(19) United States
(12) Patent Application Publication
(10) Pub. No.: US 2022/0332765 A1
(43) Pub. Date: Oct. 20, 2022

(54) CORONAVIRUS VACCINE FORMULATIONS

(71) Applicant: Novavax, Inc., Gaithersburg, MD (US)

(72) Inventors: Gale SMITH, Germantown, MD (US); Michael J. MASSARE, Mt. Airy, MD (US); Jing-Hui TIAN, Germantown, MD (US)

(21) Appl. No.: 17/700,945

(22) Filed: Mar. 22, 2022

Related U.S. Application Data
(60) Provisional application No. 63/164,487, filed on Mar. 22, 2021.
(60) Provisional application No. 63/176,825, filed on Apr. 19, 2021.
(60) Provisional application No. 63/177,059, filed on Apr. 20, 2021.
(60) Provisional application No. 63/195,986, filed on Jun. 2, 2021.
(60) Provisional application No. 63/280,395, filed on Nov. 17, 2021.
(60) Provisional application No. 63/290,439, filed on Dec. 16, 2021.
(60) Provisional application No. 63/292,196, filed on Dec. 21, 2021.
(60) Provisional application No. 63/293,468, filed on Dec. 23, 2021.

(51) Int. Cl. C07K 14/005; A61K 39/39; A61K 39/215; A61P 31/14

(52) U.S. Cl. CPC C07K 14/005; A61K 39/39; A61K 39/215; A61P 31/14; A61K 2039/55577

(57) ABSTRACT

Disclosed herein are coronavirus Spike (S) proteins and nanoparticles comprising the same, which are suitable for use in vaccines. The nanoparticles present antigens from pathogens surrounded to and associated with a detergent core resulting in enhanced stability and good immunogenicity. Dosages, formulations, and methods for preparing the vaccines and nanoparticles are also disclosed.

### CROSS-REFERENCE TO RELATED APPLICATIONS

[0001] This application claims priority to U.S. Provisional Application No. 63/164,487, filed Mar. 22, 2021; U.S. Provisional Application No. 63/176,825, filed Apr. 19, 2021; U.S. Provisional Application No. 63/177,059, filed Apr. 20, 2021; U.S. Provisional Application No. 63/195,986 filed Jun. 2, 2021; U.S. Provisional Application No. 63/280,395 filed Nov. 17, 2021; U.S. Provisional Application No. 63/290,439 filed Dec. 16, 2021; U.S. Provisional Application No. 63/292,196 filed Dec. 21, 2021; and U.S. Provisional Application No. 63/293,468 filed Dec. 23, 2021. The contents of each of the aforementioned applications are incorporated by reference herein in their entireties. This application also incorporates by reference herein International Publication No. 2021/0154812 and U.S. Pat. No. 10,953,089 in their entireties.

### DESCRIPTION OF THE TEXT FILE SUBMITTED ELECTRONICALLY

[0002] The contents of the text file submitted electronically herewith are incorporated herein by reference in their entirety: A computer readable format copy of the Sequence Listing (filename: NOVV_092_01WO_SeqList_ST25.txt, date recorded: Mar. 9, 2022; file size: 974 kilobytes).

### FIELD

[0003] The present disclosure is generally related to non-naturally occurring coronavirus (CoV) Spike (S) polypeptides and nanoparticles and vaccines comprising the same, which are useful for stimulating immune responses. The nanoparticles provide antigens, for example, glycoprotein antigens, optionally associated with a detergent core and are typically produced using recombinant approaches. The nanoparticles have improved stability and enhanced epitope presentation. The disclosure also provides compositions containing the nanoparticles, methods for producing them, and methods of stimulating immune responses.

### BACKGROUND OF THE INVENTION

[0004] Infectious diseases remain a problem throughout the world. While progress has been made on developing vaccines against some pathogens, many remain a threat to human health. The outbreak of sudden acute respiratory syndrome coronavirus 2 (SARS-CoV-2) has infected more 79 million people in the United States alone, with at least 960,000 deaths. Worldwide, the death toll has surpassed 6 million. The SARS-CoV-2 coronavirus belongs to the same family of viruses as severe acute respiratory syndrome coronavirus (SARS-CoV) and Middle East respiratory syndrome coronavirus (MERS-CoV), which have killed hundreds of people in the past 17 years. SARS-CoV-2 causes the disease COVID-19. The World Health Organization classified COVID-19 as a global pandemic in March 2020. The pandemic is still ongoing. Efforts to control it have been hindered by the emergence of variants of SARS-CoV-2.

[0005] The development of vaccines that prevent or reduce the severity of life-threatening infectious diseases caused by SARS-CoV-2 and variants thereof is desirable. However, human vaccine development remains challenging because of the highly sophisticated evasion mechanisms of pathogens and difficulties stabilizing vaccines. Optimally, a vaccine must both induce antibodies that block or neutralize infectious agents and remain stable in various environments, including environments that do not enable refrigeration.

### SUMMARY OF THE INVENTION

[0006] The present disclosure provides non-naturally occurring CoV S polypeptides suitable for inducing immune responses against SARS-CoV-2 and SARS-CoV-2 variants. The disclosure also provides nanoparticles containing the glycoproteins as well as methods of stimulating immune responses.

[0007] The present disclosure also provides CoV S polypeptides suitable for inducing immune responses against multiple coronaviruses, including SARS-CoV-2 and variants thereof, Middle East Respiratory Syndrome (MERS), and Severe Acute Respiratory Syndrome (SARS).

[0008] Provided herein are CoV S polypeptides comprising:

[0009] (i) an S1 subunit with an inactivated furin cleavage site, wherein the S1 subunit comprises an N-terminal domain (NTD), a receptor binding domain (RBD), subdomains 1 and 2 (SD1/2), wherein the inactivated furin cleavage site has an amino acid sequence of QQAQ;
[0010] wherein the NTD optionally comprises one or more modifications selected from the group consisting of:
[0011] (a) deletion of one or more amino acids selected from the group consisting of amino acid 56, 57, 131, 132, 144, 145, 228, 229, 230, 231, 234, 235, 236, 237, 238, 239, 240 and combinations thereof;
[0012] (b) insertion of 1, 2, 3, or 4 amino acids after amino acid 132; and
[0013] (c) mutation of one or more amino acids selected from the group consisting of amino acid 5, 6, 7, 13, 39, 51, 53, 54, 56, 57, 62, 63, 67, 82, 125, 129, 131, 132, 133, 139, 143, 144, 145, 177, 200, 201, 202, 209, 229. 233, 240, 245, and combinations thereof;
[0014] wherein the RBD optionally comprises mutation of one or more amino acids selected from the group consisting of amino acid 333, 404, 419, 426, 439, 440, 464, 465, 471, 477, 481, 488, and combinations thereof;
[0015] wherein the SD1/2 domain optionally comprises mutation of one or more amino acids selected from the group consisting of 557, 600, 601, 642, 664, 668, and combinations thereof; and

[0016] (ii) an S2 subunit, wherein amino acids 973 and 974 are proline, wherein the S2 subunit optionally comprises one or more modifications selected from the group consisting of:
[0017] (a) deletion of one or more amino acids from 676-685, 676-702, 702-711, 775-793, 806-815 and combinations thereof;
[0018] (b) mutation of one or more amino acids selected from the group consisting of 688, 703, 846, 875, 937, 969, 973, 974, 1014, 1058, 1105, and 1163 and combinations thereof; and
[0019] (c) deletion of one or more amino acids from the TMCT; wherein the amino acids of the CoV S glycoprotein are numbered with respect to a polypeptide having the sequence of SEQ ID NO: 2.

[0020] In embodiments, the coronavirus S glycoprotein comprises deletion of amino acids 676-685. In embodiments, the coronavirus S glycoprotein comprises deletion of amino acids 702-711. In embodiments, the coronavirus S glycoprotein comprises deletion of amino acids 806-815. In embodiments, the coronavirus S glycoprotein comprises deletion of amino acids 775-793. In embodiments, the coronavirus S glycoprotein comprises deletion of amino acids 1-292 of the NTD. In embodiments, the coronavirus S glycoprotein comprises deletion of amino acids 1201-1260 of the TMCT. In embodiments, the coronavirus S glycoprotein comprises or consists of an amino acid sequence selected from the group consisting of SEQ ID NOS: 85-89, 105, 106, and 112-115, 164-168 or an amino acid sequence with at least 90%, at least 91%, at least 92%, at least 93%, at least 94%, at least 95%, at least 96%, at least 97%, at least 98%, at least 99%, or 100% identity to any one of SEQ ID NOS: 85-89, 105, 106, and 112-115, 164-168. In embodiments, the coronavirus S glycoprotein comprises a signal peptide, optionally wherein the signal peptide comprises an amino acid sequence of SEQ ID NO: 5 or SEQ ID NO: 117. In embodiments, the coronavirus S glycoprotein comprises a C-terminal fusion protein. In embodiments, the C-terminal fusion protein is a hexahistidine tag. In embodiments, the C-terminal fusion protein is a foldon. In embodiments, the foldon has an amino acid sequence corresponding to SEQ ID NO: 68. In embodiments, the coronavirus S glycoprotein has a ΔHcal that is at least 2-fold greater than the ΔHcal of the wild-type CoV S glycoprotein (SEQ ID NO: 2). In embodiments, provided herein is a coronavirus S glycoprotein having an S2 subunit, NTD, RBD, and SD1/2 that is at least 90%, at least 91%, at least 92%, at least 93%, at least 94%, at least 95%, at least 96%, at least 97%, at least 98%, at least 99%, or at least 99.5% identical to the corresponding subunit or domain of the CoV S glycoprotein having an amino acid sequence of SEQ ID NO: 2.

[0021] Provided herein is an isolated nucleic acid encoding a CoV S glycoprotein described herein.

[0022] Provided herein is vector comprising an isolated nucleic acid encoding a CoV S glycoprotein described herein.

[0023] Provided herein is a nanoparticle comprising a CoV S glycoprotein described herein. In embodiments, the nanoparticle has a Zavg diameter of between about 20 nm and about 35 nm. In embodiments, the nanoparticle has a polydispersity index from about 0.2 to about 0.45. Provided herein is a cell expressing a CoV S glycoprotein described herein.

[0024] Provided herein is a vaccine composition comprising a nanoparticle comprising a CoV S glycoprotein described herein. In embodiments, the vaccine composition comprises an adjuvant. In embodiments, the adjuvant comprises at least two iscom particles, wherein: the first iscom particle comprises fraction A of Quillaja Saponaria Molina and not fraction C of Quillaja Saponaria Molina; and the second iscom particle comprises fraction C of Quillaja Saponaria Molina and not fraction A of Quillaja Saponaria Molina. In embodiments, fraction A of Quillaja Saponaria Molina and fraction C of Quillaja Saponaria Molina account for about 85% by weight and about 15% by weight, respectively, of the sum of weights of fraction A of Quillaja Saponaria Molina and fraction C of Quillaja Saponaria Molina in the adjuvant. In embodiments, fraction A of Quillaja Saponaria Molina and fraction C of Quillaja Saponaria Molina account for about 92% by weight and about 8% by weight, respectively, of the sum of weights of fraction A of Quillaja Saponaria Molina and fraction C of Quillaja Saponaria Molina in the adjuvant. In embodiments, the vaccine composition comprises about 50 μg adjuvant.

[0025] Provided herein is a method of stimulating an immune response against SARS-CoV-2 in a subject comprising administering a vaccine composition described herein. In embodiments, the subject is administered a first dose at day 0 and a boost dose at day 21. In embodiments, the subject is administered from about 3 μg to about 25 μg of coronavirus S glycoprotein. In embodiments, the subject is administered about 5 μg of coronavirus S glycoprotein. In embodiments, the vaccine composition is administered intramuscularly. In embodiments, a single dose of the vaccine composition is administered. In embodiments, multiple doses of the vaccine composition are administered. In embodiments, the vaccine composition is coadministered with an influenza glycoprotein.

[0026] Provided herein is an immunogenic composition comprising: (i) a nanoparticle comprising a CoV S glycoprotein described herein, and a non-ionic detergent core; (ii) a pharmaceutically acceptable buffer; and (iii) a saponin adjuvant. In embodiments, the immunogenic composition comprises from about 3 μg to about 25 μg of CoV S glycoprotein. In embodiments, the immunogenic composition comprises about 5 μg of CoV S glycoprotein. In embodiments, the saponin adjuvant comprises at least two iscom particles, wherein: the first iscom particle comprises fraction A of Quillaja Saponaria Molina and not fraction C of Quillaja Saponaria Molina; and the second iscom particle comprises fraction C of Quillaja Saponaria Molina and not fraction A of Quillaja Saponaria Molina. In embodiments, fraction A of Quillaja Saponaria Molina accounts for 50-96% by weight and fraction C of Quillaja Saponaria Molina accounts for the remainder, respectively, of the sum of the weights of fraction A of Quillaja Saponaria Molina and fraction C of Quillaja Saponaria Molina in the adjuvant. In embodiments, fraction A of Quillaja Saponaria Molina and fraction C of Quillaja Saponaria Molina account for about 85% by weight and about 15% by weight, respectively, of the sum of the weights of fraction A of Quillaja Saponaria Molina and fraction C of Quillaja Saponaria Molina in the adjuvant. In embodiments, the immunogenic composition comprises about 50 μg of saponin adjuvant. In embodiments, the non-ionic detergent is selected from the group consisting of polysorbate-20 (PS20), polysorbate-40 (PS40), polysorbate-60 (PS60), polysorbate-65 (PS65), and polysorbate-80 (PS80).

[0027] In embodiments, provided herein is a method of stimulating an immune response against SARS-CoV-2 or a heterogeneous SARS-CoV-2 strain in a subject comprising administering the immunogenic composition or vaccine composition provided herein. In embodiments, the method comprises administering from about 3 μg to about 25 μg of CoV S glycoprotein. In embodiments, the method comprises administering about 5 μg of CoV S glycoprotein. In embodiments, the saponin adjuvant comprises at least two iscom particles, wherein: the first iscom particle comprises fraction A of Quillaja Saponaria Molina and not fraction C of Quillaja Saponaria Molina; and the second iscom particle comprises fraction C of Quillaja Saponaria Molina and not fraction A of Quillaja Saponaria Molina. In embodiments, fraction A of Quillaja Saponaria Molina accounts for 50-96% by weight and fraction C of Quillaja Saponaria Molina accounts for the remainder, respectively, of the sum of the weights of fraction A of Quillaja Saponaria Molina and fraction C of Quillaja Saponaria Molina in the adjuvant. In embodiments, fraction A of Quillaja Saponaria Molina and fraction C of Quillaja Saponaria Molina account for about 85% by weight and about 15% by weight, respectively, of the sum of the weights of fraction A of Quillaja Saponaria Molina and fraction C of Quillaja Saponaria. In embodiments, the method comprises administering about 50 μg of the saponin adjuvant. In embodiments, the non-ionic detergent is selected from the group consisting of polysorbate-20 (PS20), polysorbate-40 (PS40), polysorbate-60 (PS60), polysorbate-65 (PS65), and polysorbate-80 (PS80). In embodiments, the subject is administered a first dose at day 0 and a boost dose at day 21. In embodiments, a single dose of the immunogenic composition is administered. In embodiments, the method comprises administering a second immunogenic composition. In embodiments, the second immunogenic composition comprises an mRNA encoding a SARS-Cov-2 Spike glycoprotein, a plasmid DNA encoding a SARS-Cov-2 Spike glycoprotein, a viral vector encoding a SARS-Cov-2 Spike glycoprotein, or an inactivated SARS-CoV-2 virus. In embodiments, the heterogenous SARS-CoV-2 strain is selected from the group consisting of a B.1.1.7 SARS-CoV-2 strain, B.1.351 SARS-CoV-2 strain, P.1 SARS-CoV-2 strain, B.1.617.2 SARS-CoV-2 strain, B.1.525 SARS-CoV-2 strain, B.1.526 SARS-CoV-2 strain, B.1.617.1 SARS-CoV-2 strain, a C.37 SARS-CoV-2 strain, B.1.621 SARS-CoV-2 strain, and a Ca1.20C SARS-CoV-2 strain. In embodiments, the efficacy of the immunogenic composition for preventing coronavirus disease-19 (COVID-19) is at least about 50%, at least about 55%, at least about 60%, at least about 65%, at least about 70%, at least about 75%, at least about 80%, at least about 85%, about least about 90%, at least about 91%, at least about 92%, at least about 93%, at least about 94%, at least about 95%, at least about 96%, at least about 97%, at least about 98%, at least about 99%, or about 100% for up to about 2 months, up to about 2.5 months, up to about 3 months, up to about 3.5 months, up to about 4 months, up to about 4.5 months, up to about 5 months, up to about 5.5 months, up to about 6 months, up to about 6.5 months, up to about 7 months, up to about 7.5 months, up to about 8 months, up to about 8.5 months, up to about 9 months, up to about 9.5 months, up to about 10 months, up to about 10.5 months, up to about 11 months, up to about 11.5 months, or up to about 12 months after administration of the immunogenic composition. In embodiments, the efficacy of the immunogenic composition for preventing coronavirus disease-19 (COVID-19) is from about 50% to about 99%, from about 50% to about 95%, from about 50% to about 90%, from about 50% to about 85%, from about 50% to about 80%, from about 60% to about 99%, from about 60% to about 95%, from about 60% to about 90%, from about 60% to about 85%, from about 60% to about 80%, from about 40% to about 99%, from about 40% to about 95%, from about 40% to about 90%, from about 40% to about 85%, from about 40% to about 80%, from about 40% to about 75%, from about 40% to about 70%, from about 40% to about 65%, from about 40% to about 55%, or from about 40% to about 50% for up to about 2 months, up to about 2.5 months, up to about 3 months, up to about 3.5 months, up to about 4 months, up to about 4.5 months, up to about 5 months, up to about 5.5 months, up to about 6 months, up to about 6.5 months, up to about 7 months, up to about 7.5 months, up to about 8 months, up to about 8.5 months, up to about 9 months, up to about 9.5 months, up to about 10 months, up to about 10.5 months, up to about 11 months, up to about 11.5 months, or up to about 12 months after administration of the immunogenic composition. In embodiments, the COVID-19 is mild COVID-19. In embodiments, the COVID-19 is moderate COVID-19. In embodiments, the COVID-19 is severe COVID-19. In embodiments, provided herein is a method of inducing a protective immune response against a heterogenous SARS-CoV-2 strain, comprising administering to a subject a nanoparticle comprising a coronavirus S (CoV S) glycoprotein having the amino acid sequence of SEQ ID NO: 87, and a non-ionic detergent core, a pharmaceutically acceptable buffer, and (iii) a saponin adjuvant, wherein the heterogenous SARS-CoV-2 strain has a SARS-CoV-2 S glycoprotein having from about 1 to about 60 modifications compared to a SARS-CoV-2 glycoprotein of SEQ ID NO: 1. In embodiments, the heterogeneous SARS-CoV-2 strain has a SARS-CoV-2 S glycoprotein having from about 1 to about 20 modifications, from about 1 to about 10 modifications, from about 10 to about 20 modifications, from 10 to about 30 modifications, from about 10 to about 40 modifications, from 10 to about 50 modifications, from 10 to about 60 modifications, from 20 to about 60 modifications, from 20 to about 50 modifications, from about 20 to about 40 modifications, from about 5 to about 15 modifications, or from about 5 to about 10 modifications compared to a SARS-CoV-2 glycoprotein of SEQ ID NO: 1.

### BRIEF DESCRIPTION OF THE DRAWINGS

[0028] The patent or application file contains at least one drawing executed in color. Copies of this patent or patent application publication with color drawing(s) will be provided by the Office upon request and payment of the necessary fee.

[0029] FIG. 1 shows a schematic of the wild-type amino acid sequence of the SARS-CoV-2 Spike (S) protein (SEQ ID NO: 1). The furin cleavage site RRAR (SEQ ID NO: 6) is highlighted in bold, and the signal peptide is underlined.

[0030] FIG. 2 shows the primary structure of a SARS-CoV-2 S polypeptide, which has an inactive furin cleavage site, a fusion peptide deletion, and K986P and V987P mutations. The domain positions are numbered with respect to the amino acid sequence of the wild-type CoV S polypeptide from SARS-CoV-2 containing a signal peptide (SEQ ID NO: 1).

[0031] FIG. 3 shows the primary structure of the BV2378 CoV S polypeptide, which has an inactive furin cleavage site, a fusion peptide deletion of amino acids 819-828, and K986P and V987P mutations. The domain positions are numbered with respect to the amino acid sequence of the wild-type CoV S polypeptide from SARS-CoV-2 containing a signal peptide (SEQ ID NO: 1).

[0032] FIG. 4 shows purification of the CoV S polypeptides BV2364, BV2365, BV2366, BV2367, BV2368, BV2369, BV2373, BV2374, and B V2375. The data reveal that BV2365 (SEQ ID NO: 4) and BV2373 (SEQ ID NO: 87) which has an inactive furin cleavage site having an amino acid sequence of QQAQ (SEQ ID NO: 7) is expressed as a single chain (S0). In contrast, CoV S polypeptides containing an intact furin cleavage site (e.g. BV2364, BV2366, and BV2374) are cleaved, as evident by the presence of the cleavage product S2.

[0033] FIG. 5 shows that the CoV S polypeptides BV2361, BV2365, BV2369, BV2365, BV2373, and BV2374 bind to human angiotensin-converting enzyme 2 precursor (hACE2) by bio-layer interferometry.

[0034] FIG. 6 shows that BV2361 from SARS-CoV-2 does not bind the MERS-CoV receptor, dipeptidyl peptidase IV (DPP4) and the MERS S protein does not bind to human angiotensin-converting enzyme 2 precursor (hACE2) by bio-layer interferometry.

[0035] FIG. 7 shows that BV2361 binds to hACE2 by enzyme-linked immunosorbent assay (ELISA).

[0036] FIG. 8 shows the primary structure of the BV2373 CoV S polypeptide and modifications to the furin cleavage site, K986P, and V987P.

[0037] FIG. 9 shows purification of the wild type CoV S polypeptide and the CoV S polypeptides BV2365 and BV2373.

[0038] FIG. 10 shows a cryo-electron microscopy (cryoEM) structure of the BV2373 CoV S polypeptide overlaid on the cryoEM structure of the SARS-CoV-2 spike protein (EMB ID: 21374).

[0039] FIGS. 11A-F show that the CoV S Spike polypeptides BV2365 and BV2373 bind to hACE2. Bio-layer interferometry reveals that BV2365 (FIG. 11B) and BV2373 (FIG. 11C) bind to hACE2 with similar dissociation kinetics to the wild-type CoV S polypeptide (FIG. 11A) ELISA shows that the wild-type CoV S polypeptide (FIG. 11D) and BV2365 (FIG. 11E) bind to hACE2 with similar affinity while BV2373 binds to hACE2 at a higher affinity (FIG. 11F).

[0040] FIGS. 12A-B show the effect of stress conditions, such as temperature, two freeze/thaw cycles, oxidation, agitation, and pH extremes on binding of the CoV S polypeptides BV2373 (FIG. 12A) and BV2365 (FIG. 12B) to hACE2.

[0041] FIGS. 13A-B show anti-CoV S polypeptide IgG titers 13 days, 21 days, and 28 days after immunization of mice with two doses (FIG. 13A) and one dose of 0.1 μg to 10 μg of BV2373 with or without Fraction A and Fraction C iscom matrix (i.e., MATRIX-M™) (FIG. 13B).

[0042] FIG. 14 shows the induction of antibodies that block interaction of hACE2 in mice immunized with one dose or two doses of 0.1 μg to 10 μg of BV2373 with or without MATRIX-M™.

[0043] FIG. 15 shows virus neutralizing antibodies detected in mice immunized with one dose or two doses of 0.1 μg to 10 μg of BV2373 with or without MATRIX-M™.

[0044] FIG. 16 shows the virus load (SARS-CoV-2) in the lungs of Ad/CMV/hACE2 mice immunized with either a single dose of BV2373 or two doses of BV2373 spaced 14 days apart with or without MATRIX-M™.

[0045] FIGS. 17A-C shows weight loss exhibited by mice after immunization with BV2373. FIG. 17A shows the effect of immunization on weight loss with a single 0.01 μg, 0.1 μg, 1 μg, or 10 μg of BV2373 plus MATRIX-M™. FIG. 17B shows the effect of immunization on weight loss with two doses of BV2373 (0.01 μg, 0.1 μg, 1 μg) plus MATRIX-M™. FIG. 17C shows the effect of immunization on weight loss with two doses of BV2373 (10 μg) in the presence or absence of MATRIX-M™.

[0046] FIGS. 18A-B shows the effect of BV2373 on lung histopathology of mice four days (FIG. 18A) or seven days (FIG. 18B) after infection with SARS-CoV-2.

[0047] FIG. 19 shows the number of secreting cells after ex vivo stimulation in the spleens of mice immunized with BV2373 in the absence of adjuvant compared to mice immunized with BV2373 in the presence of MATRIX-M™.

[0048] FIGS. 20A-E shows the frequency of cytokine secreting CD4+ T cells in the spleens of mice immunized with BV2373 in the presence or absence of MATRIX-M™. FIG. 20A shows the frequency of IFN-γ secreting CD4+ T cells. FIG. 20B shows the frequency of TNF-α secreting CD4+ T cells. FIG. 20C shows the frequency of IL-2 secreting CD4+ T cells. FIG. 20D shows the frequency of CD4+ T cells that secrete two cytokines selected from IFN-γ, TNF-α, and IL-2. FIG. 20E shows the frequency of CD4+ T cells that express IFN-γ, TNF-α, and IL-2.

[0049] FIGS. 21A-E shows the frequency of cytokine secreting CD8⁺ T cells in the spleens of mice immunized with BV2373 in the presence or absence of MATRIX-M™. FIG. 21A shows the frequency of IFN-γ secreting CD8⁺ T cells. FIG. 21B shows the frequency of TNF-α secreting CD8⁺ cells. FIG. 21C shows the frequency of IL-2 secreting CD8⁺ T cells. FIG. 20D shows the frequency of CD8⁺ T cells that secrete two cytokines selected from IFN-γ, TNF-α, and IL-2. FIG. 21E shows the frequency of CD8⁺ T cells that express IFNγ, TNF-α, and IL-2.

[0050] FIG. 22 illustrates the frequency of CD4⁺ or CD8⁺ cells that express one (single), two (double), or three (triple) cytokines selected from IFN-γ, TNF-α, and IL-2 in the spleens of mice immunized with BV2373 in the presence or absence of MATRIX-M™.

[0051] FIGS. 23A-C illustrate the effect of immunization with BV21373 in the presence or absence of MATRIX-M™ on type 2 cytokine secretion from CD4⁺ T cells. FIG. 23A shows the frequency of IL-4 secreting cells. FIG. 23B shows the frequency of IL-5 CD4⁺ secreting cells. FIG. 23C shows the ratio of IFN-γ secreting to IL-4 secreting CD4⁺ T cells.

[0052] FIGS. 24A-B illustrate the effect of mouse immunization with BV2373 in the presence or absence of MATRIX-M™ on germinal center formation by assessing the presence of CD4⁺ T follicular helper cells (TFH). FIG. 24A shows the frequency of CD4⁺ T follicular helper cells in spleens, and FIG. 24B shows the phenotype (e.g. CD4⁺ CXCR5⁺ PD-1⁺) of the CD4⁺ T follicular helper cells.

[0053] FIGS. 25A-B illustrate the effect of mouse immunization with BV2373 in the presence or absence of MATRIX-M™ on germinal center formation by assessing the presence of germinal center (GC) B cells. FIG. 25A shows the frequency of GC B cells in spleens, and FIG. 25B reveals the phenotype (e.g. CD19⁺ GL7⁺ CD-95⁺) of the CD4⁺ T follicular helper cells.

[0054] FIGS. 26A-C show the effect of immunization with BV2373 in the presence or absence of MATRIX-M™ on antibody response in olive baboons. FIG. 26A shows the anti-SARS-CoV-2 S polypeptide IgG titer in baboons after immunization with BV2373. FIG. 26B shows the presence of hACE2 receptor blocking antibodies in baboons following a single immunization with 5 μg or 25 μg of BV2373 in the presence of MATRIX-M™. FIG. 26C shows the titer of virus neutralizing antibodies following a single immunization with BV2373 and MATRIX-M™.

[0055] FIG. 27 shows the significant correlation between anti-SARS-CoV-2 S polypeptide IgG and neutralizing antibody titers in olive baboons after immunization with BV2373.

[0056] FIG. 28 shows the frequency of IFN-γ secreting cells in peripheral blood mononuclear cells (PBMC) of olive baboons immunized with BV2373 in the presence or absence of MATRIX-M™.

[0057] FIGS. 29A-E shows the frequency of cytokine secreting CD4+ T cells in the PBMC of olive baboons immunized with BV2373 in the presence or absence of MATRIX-M™. FIG. 29A shows the frequency of IFN-γ secreting CD4+ T cells. FIG. 29B shows the frequency of IL-2 secreting CD4+ T cells. FIG. 29C shows the frequency of TNF-α secreting CD4+ cells. FIG. 29D shows the frequency of CD4+ T cells that secrete two cytokines selected from IFN-γ, TNF-α, and IL-2. FIG. 29E shows the frequency of CD4+ T cells that express IFN-γ, TNF-α, and IL-2.

[0058] FIG. 30 shows a schematic of the coronavirus Spike (S) protein (SEQ ID NO: 109) (BV2384). The furin cleavage site GSAS (SEQ ID NO: 97) is underlined once, and the K986P and V987P mutations are underlined twice.

[0059] FIG. 31 shows a schematic of the coronavirus Spike (S) protein (SEQ ID NO: 86) (BV2373). The furin cleavage site QQAQ (SEQ ID NO: 7) is underlined once, and the K986P and V987P mutations are underlined twice.

[0060] FIG. 32 shows purification of the CoV S polypeptides BV2373 (SEQ ID NO: 87) and BV2384 (SEQ ID NO: 109).

[0061] FIG. 33 shows a scanning densitometry plot of BV2384 (SEQ ID NO: 109) purity after purification.

[0062] FIG. 34 shows a scanning densitometry plot of BV2373 (SEQ ID NO: 87) purity after purification

[0063] FIGS. 35A-B illustrates induction of anti-S antibodies (FIG. 35A) and neutralizing antibodies (FIG. 35B) in response to administration of BV2373 and MATRIX-M™. Cynomolgus macaques were administered one or two doses (Day 0 and Day 21) of 2.5 μg, 5 μg, or 25 μg of BV2373 with 25 μg or 50 μg MATRIX-M™ adjuvant. Controls received neither BV2373 or MATRIX-M™. Antibodies were measured at Days 21 and 33.

[0064] FIGS. 36A-B illustrates a decrease of SARS-CoV-2 viral replication by vaccine formulations disclosed herein as assessed in broncheoalveol lavage (BAL) in Cynomolgus macaques. Cynomolgus macaques were administered BV2373 and MATRIX-M™ as shown. Subjects were immunized Day 0 and in the groups with two doses Day 0 and Day 21. Subject animals were challenged Day 37 with 1×10⁴ pfu SARS-CoV-2 virus. Viral RNA (FIG. 36A, corresponding to total RNA present) and viral sub-genomic RNA (FIG. 36B, corresponding to replicating virus) levels were assessed in bronchiolar lavage (BAL) at 2 days and 4 days post-challenge with infectious virus (d2pi and d4pi). Most subjects showed no viral RNA. At Day 2 small amounts of RNA were measured in some subjects. By Day 4, no RNA was measured except for two subjects at the lowest dose of 2.5 μg. Sub-genomic RNA was not detected at either 2 Days or 4 days except for 1 subject, again at the lowest dose.

[0065] FIGS. 37A-B illustrates a decrease of SARS-CoV-2 viral replication by vaccine formulations disclosed herein as assessed in nasal swab in Cynomolgus macaques. Cynomolgus macaques were administered BV2373 with MATRIX-M™ as shown. Subjects were immunized Day 0 and in the groups with two doses Day 0 and Day 21. Subject animals were challenged Day 37 with 1×10⁴ SARS-CoV-2 virus. Viral RNA (FIG. 37A) and viral sub-genomic (sg) RNA (FIG. 37B) were assessed by nasal swab at 2 days and 4 days post-infection (d2pi and d4pi). Most subjects showed no viral RNA. At Day 2 and Day 4 small amounts of RNA were measured in some subjects. Sub-genomic RNA was not detected at either 2 Days or 4 days. Subjects were immunized Day 0 and in the groups with two doses Day 0 and Day 21. These data show that the vaccine decreases nose total virus RNA by 100-1000 fold and sgRNA to undetectable levels, and confirm that immune response to the vaccine will block viral replication and prevent viral spread.

[0066] FIGS. 38A-B show anti-CoV S polypeptide IgG titers 21 days and 35 days after immunization of Cynomolgus macaques with one dose (FIG. 38A) or two doses of BV2373 and 25 μg or 50 μg of MATRIX-M™ (FIG. 38B).

[0067] FIGS. 38C-38D shows the hACE2 inhibition titer of Cynomolgus macaques 21 days and 35 days after immunization of Cynomolgus macaques with one dose (FIG. 38C) or two doses of BV2373 (5 μg) and MATRIX-M™ (25 μg or 50 μg) (FIG. 38D).

[0068] FIG. 38E shows the significant correlation between anti-CoV S polypeptide IgG titer and hACE2 inhibition titer in Cynomolgus macaques after administration of BV2373 and MATRIX-M™. Data is shown for Groups 2-6 of Table 4.

[0069] FIG. 39 shows the anti-CoV S polypeptide titers and hACE2 inhibition titer of Cynomolgus macaques 35 days after immunization with two doses of BV2373 and MATRIX-M™ or after immunization with convalescent human serum (Groups 2, 4, and 6) of Table 4. These data show that the anti-CoV S polypeptide and hACE2 inhibition titers of Cynomologus macaques immunized with BV2373 and MATRIX-M™ is superior to Cynomolgus macaques immunized with convalescent serum.

[0070] FIGS. 40A-B shows the SARS-CoV-2 neutralizing titers of Cynomolgus macaques immunized with BV2373 and MATRIX-M™ determined by cytopathic effect (CPE) (FIG. 40A) and plaque reduction neutralization test (PRNT) (FIG. 40B).

[0071] FIG. 41 shows administration timings of a clinical trial that evaluated the safety and efficacy of a vaccine comprising BV2373 and optionally MATRIX-M™. AESI denotes an adverse event of special interest. MAEE denotes a medically attended adverse event, and SAE denotes a serious adverse event.

[0072] FIGS. 42A-B show the local (FIG. 42A) and systemic adverse events (FIG. 42B) experienced by patients in a clinical trial which evaluated a vaccine comprising BV2373 and MATRIX-M™. Groups A-E are identified in Table 5. The data shows that the vaccine was well tolerated and safe.

[0073] FIGS. 43A-B show the anti-CoV S polypeptide IgG (FIG. 43A) and neutralization titers (FIG. 43B) 21 days and 35 days after immunization of participants in a clinical trial which evaluated a vaccine comprising BV2373 and MATRIX-M™. Horizontal bars represent interquartile range (IRQ) and median area under the curve, respectively. Whisker endpoints are equal to the maximum and minimum values below or above the median±1.5 times the IQR. The convalescent serum panel includes specimens from PCR-confirmed COVID-19 participants from Baylor College of Medicine (29 specimens for ELISA and 32 specimens for microneutralization (MN IC_{>99}). Severity of COVID-19 is denoted as a red mark for hospitalized patients (including intensive care setting), a blue mark for outpatient-treated patients (sample collected in emergency department), and a green mark for asymptomatic (exposed) patients (sample collected from contact/exposure assessment).

[0074] FIGS. 44A-C shows the correlation between anti-CoV S polypeptide IgG and neutralizing antibody titers in patients administered convalescent sera (FIG. 44A), two 25 μg doses of BV2373 (FIG. 44B), and two doses (5 μg and 25 μg) of BV2373 with MATRIX-M™ (FIG. 44C). A strong correlation was observed between neutralizing antibody titers and anti-COV-S IgG titers in patients treated with convalescent sera or with adjuvanted BV2373, but not in patients treated with BV2373 in the absence of adjuvant.

[0075] FIGS. 45A-D show the frequencies of antigen-specific CD4⁺ T cells producing T helper 1 (Th1) cytokines interferon-gamma (IFN-γ), tumor necrosis factor-alpha (TNF-α), and interleukin (IL)-2 and T helper 2 (Th2) cytokines IL-5 and IL-13 indicated cytokines from participants in Groups A (placebo, FIG. 45A), B (25 μg BV2373, FIG. 45B), C (5 μg BV2373 and 50 μg MATRIX-M™, FIG. 45C), and D (25 μg BV2373 and 50 μg MATRIX-M™, FIG. 45D) following stimulation with BV2373. “Any 2” in Th1 cytokine panel means CD4⁺ T cells that can produce two types of Th1 cytokines at the same time. “All 3” indicates CD4⁺ T cells that produce IFN-γ, TNF-α, and IL-2 simultaneously. “Both” in Th2 panel means CD4⁺ T cells that can produce Th2 cytokines IL-5 and IL-13 at the same time.

[0076] FIG. 46A shows the primary structure of a wild-type SARS-CoV-2 S polypeptide, containing a signal peptide, numbered with respect to SEQ ID NO: 1. FIG. 46B shows the primary structure of a wild-type SARS-CoV-2 S polypeptide, without a signal peptide, numbered with respect to SEQ ID NO: 2.

[0077] FIG. 47 shows the randomization of subjects in a Phase 3 clinical trial that evaluated the efficacy, immunogenicity, and safety of BV2373 in combination with Fraction A and Fraction C iscom matrix (MATRIX-M™) adjuvant.

[0078] FIG. 48 is a Kaplan-Meyer plot showing the incidence of symptomatic COVID-19 (Cumulative Event Rate (%) experienced by subjects after vaccination with BV2373 in combination with Fraction A and Fraction C iscom matrix (MATRIX-M™) or placebo.

[0079] FIG. 49 shows vaccine efficacy of BV2373 in combination with Fraction A and Fraction C iscom matrix (MATRIX-M™) against SARS-CoV-2 comprising a CoV S polypeptide having the amino acid sequence of SEQ ID NO: 1 or the heterogeneous B.1.1.7 SARS-CoV-2 strain which comprises a CoV S polypeptide having deletions of amino acids 69, 70, and 144 and mutations of N501Y, A570D, D614G, P681H, T716I, S982A, and D1118H.

[0080] FIG. 50 is a graph showing adverse events experienced by subjects after a first vaccination dose (labeled “Vaccination 1”) and a second vaccination dose (labeled “Vaccination 2”) with BV2373 in combination with Fraction A and Fraction C iscom matrix (MATRIX-M™) (labeled “A”) or placebo (labeled “B”).

[0081] FIG. 51 shows a diagram of the BV2438 CoV S polypeptide. Structural elements include the cleavable signal peptide (SP), N-terminal domain (NTD), receptor binding domain (RBD), subdomains 1 and 2 (SD1 and SD2), S2 cleavage site (S2′), fusion peptide (FP), heptad repeat 1 (HR1), central helix (CH), heptad repeat 2 (HR2), transmembrane domain (TM), and cytoplasmic tail (CT). Amino acid changes from the CoV S polypeptide having an amino acid sequence of SEQ ID NO: 1 are shown in black text underneath the linear diagram.

[0082] FIG. 52A shows a reduced SDS-PAGE gel with Coomassie blue staining of purified full-length BV2438 showing the main protein product at the expected molecular weight of ˜170 kD. FIG. 52B shows a graph of the scanning densitometry. FIG. 52C shows negative stain transmission electron micrographs of BV2438. BV2438 forms a well-defined lightbulb-shaped particle with a length of 15 nm and a width of 11 nm (left panel). Trimers exhibited an 8 nm flexible linker connected to PS-80 micelles (left panel). Class average images showed a good fit of the rS-B.1.351 trimer with a cryo-EM solved structure of the prefusion SARS-CoV-2 trimeric spike protein ectodomain (PDB ID 6VXX) overlaid on the 2D image (middle panel). The right panel shows two BV2438 trimers anchored into a PS-80 micelle.

[0083] FIG. 53 shows the mouse study design of Example 10. Groups of mice (n=20/group) were immunized in a prime/boost regimen on study days 0 and 14 with various combinations of recombinant S (rS) BV2438 (SA) or BV2373 (WU) protein. Mice were either primed and boosted with BV2438, primed and boosted with BV2373, primed with BV2373 and boosted with BV2438, or primed and boosted with bivalent BV2373+BV2438. Antigen doses were 1 μg rS for each monovalent immunization, or 1 μg rS for each construct upon bivalent immunization (2 μg rS total). All antigen doses were administered with 5 μg saponin adjuvant. A control group received formulation buffer (Placebo). Sera and tissues were collected at the timepoints listed in the diagram.

[0084] FIGS. 54A-B shows Anti-SARS-CoV-2 S IgG serum titers in sera collected on Day 21 of the mouse study of Example 10. ELISA was used to measure antibody titers against the Wuhan-Hu-1 spike protein (FIG. 54A) or B.1.351 spike protein (FIG. 54B). Bars indicate the geometric mean titer (GMT) and error bars represent 95% confidence interval (CI) for each group. Individual animal titers are indicated with colored symbols. FIGS. 54C-D show functional antibody titers (as measured by ELISA) in sera collected on Day 21 capable of disrupting binding between the SARS-CoV-2 receptor hACE2 and Wuhan-Hu-1 spike protein (FIG. 54C) or B.1.351 spike protein (FIG. 54D). Bars indicate the geometric mean titer (GMT) and error bars represent 95% confidence interval (CI) for each group. Individual animal titers are indicated with colored symbols. FIG. 54E shows SARS-CoV-2 neutralizing antibody titers in sera collected on Day 32 from n=5 animals/group were determined using a PRNT assay. Sera were evaluated for their ability to neutralize SARS-CoV-2 USA-WA1, B.1.351 variant, or B.1.1.7 variant. Bars indicate the geometric mean titer (GMT) and error bars represent 95% confidence interval (CI) for each group. Individual animal titers are indicated with symbols. Statistical significance was calculated by performing one-way ANOVA with Tukey's post hoc test on log to-transformed data.

[0085] FIGS. 55A-F show the protective efficacy of immunization with SARS-CoV-2 rS based on Wuhan-Hu-1 or B.1.351 against challenge with live SARS-CoV-2 B.1.351 or B.1.1.7 virus. The study design was described in FIG. 53. Immunized mice (n=10/group) were challenged with live SARS-CoV-2 B.1.351 (left panels) or B.1.1.7 (right panels). For four days after challenge, mice were weighed daily and their percentage weight loss was calculated relative to their body weight on challenge day FIG. 55A and FIG. 55B show the mean percentage body weight loss with symbols. Error bars represent standard error of the mean. Half of the mice were sacrificed at 2 days post-challenge and lung tissue was subjected to a plaque formation assay to determine lung viral titers (FIG. 55C, FIG. 55D). The remaining mice were sacrificed at 4 days post-challenge. FIG. 55E and FIG. 55F show levels of SARS-CoV-2 subgenomic RNA in lung tissue and expressed as fold-change in RNA relative to the mean in the respective Placebo group on Day 2 post-challenge. Horizontal bars represent group mean fold-change from n=5 mice at each timepoint and error bars represent standard deviation.

[0086] FIGS. 56A-H show cell-mediated immunity induced upon immunization with BV2373 or BV2438 regimens in mice. FIG. 56A shows the mouse study design. Groups of mice (n=8/group) were immunized in a prime/boost regimen on Days 0 and 21 with various combinations of SARS-CoV-2 rS based on BV2373 or BV2438. Mice were either primed and boosted with BV2438, primed and boosted with BV2373, primed with BV2373 and boosted with BV2438, or primed and boosted with bivalent BV2373 and BV2438. Antigen doses were 1 μg rS for each monovalent immunization, or 1 μg rS for each construct upon bivalent immunization (2 μg rS total). All immunizations were administered with 5 μg Matrix-M1 adjuvant. A control group received formulation buffer (Placebo, n=5). Spleens were harvested on Day 28 for cell collection. Splenocytes were stimulated with BV2373 or BV2438, then subjected to ELISA to determine IFN-γ-positive cells as a representative Th1 cytokine (FIG. 56B) and IL-5-positive cells as a representative Th2 cytokine (FIG. 56C). Data from FIG. 56B and FIG. 56C were used to calculate the Th1/Th2 balance of responses to immunization (FIG. 56D). FIG. 56E shows the numbers of multifunctional CD4+ T cells that stained positively for three Th1 cytokines (IFN-γ, IL-2, and TNF-α) using intracellular cytokine staining were quantified and expressed as the number of triple cytokine positive cells per 10⁶ CD4+ T cells. FIG. 56F shows quantification of T follicular helper cells. T follicular helper cells were quantified by determining the percentage of PD-1+CXCR5+ cells among all CD4+ T cells. FIG. 56G shows germinal center formation Germinal center formation was evaluated by determining the percentage of GL7+CD95+ cells among CD19+ B cells using flow cytometry. Gray bars represent means and error bars represent standard deviation. Individual animal data are shown with colored symbols. An example of the gating strategy is shown in FIG. 56H. Differences among experimental groups were evaluated by one-way ANOVA with Tukey's post-hoc test (data in FIG. 56B were log₁₀-transformed before analysis). P values<0.05 were considered statistically significant; ****=p<0.0001.

[0087] FIGS. 57A-E show the CD4+ and CD8+ T cell response from immunization with BV2373 or BV2438. Groups of mice (n=8/group) were immunized in a prime/boost regimen on Days 0 and 21 with various combinations of BV2373 or BV2438. Mice were either primed and boosted with BV2438, primed and boosted with BV2373, primed with BV2373 and boosted with BV2438, or primed and boosted with bivalent BV2373 and BV2438. Antigen doses were 1 μg rS for each monovalent immunization, or 1 μg rS for each construct upon bivalent immunization (2 μg rS total). All antigen doses were administered with 5 μg saponin adjuvant. A control group received formulation buffer (Placebo, n=5). Spleens were harvested on Day 28 for cell collection. Isolated splenocytes were stimulated with either rS-WU1 or rS-B.1.351, then subjected to intracellular cytokine staining to determine whether CD4+ T cells were positive for IFN-γ (FIG. 57A), IL-2 (FIG. 57B), TNF-α (FIG. 57C), or IL-4 (FIG. 57D). To examine CD8+ T cell responses, cells were stimulated with a peptide pool corresponding to the entire Wuhan-Hu-1 spike protein sequence, then subjected to ICS for IFN-γ, IL-2, and TNF-α (FIG. 57E).

[0088] FIGS. 58A-G show the immunogenicity of one or two booster BV2438 doses approximately one year after immunization with BV2373 in baboons. FIG. 58A shows the study design. A small cohort of baboons (n=2-3/group) were originally immunized with 1 μg, 5 μg, or 25 μg BV2373 with saponin adjuvant or unadjuvanted 25 μg BV2373 on Day 0 and 21 (Week 0 and 3, respectively). Approximately 1 year later, all animals were boosted with one or two doses of 3 μg BV2438 with 50 μg saponin adjuvant on Day 318 and 339 (Week 45 and 48, respectively). FIG. 58B show the anti-CoV S IgG titer over the course of the study. Individual animals' titers are shown over time, different colored symbols and lines represent different dose groups for the initial rS-WU1 immunization series. Sera collected before BV2438 boost (Day 303) as well as 7, 21, 35, and 81 days after the boost were analyzed to determine anti-rS-WUI1 (FIG. 58C) and rS-B.1.351 (FIG. 58D) IgG titers by ELISA (horizontal lines represent means), antibody titers capable of disrupting the interaction between rS-WU1 or rS-B.1.351 and the hACE2 receptor by ELISA (FIG. 58E, horizontal lines represent means), and antibody titers capable of neutralizing SARS-CoV-2 strains USA-WA1, B.1.351, and B.1.1.7 with a PRNT assay (FIG. 58F, gray bars represent geometric means and error bars represent 95% confidence intervals). The presence of multifunctional CD4+ T cells positive for 3 Th1 cytokines (IFN-γ, IL-2, and TNF-α) was evaluated with intracellular cytokine staining after stimulation with BV2373 or BV2438 (FIG. 58G). Gray bars represent means and colored symbols represent individual animal data.

[0089] FIGS. 59A-G show individual Cytokine Responses to BV2438 boost in baboons. A small cohort of baboons (n=2-3/group) was immunized with 1 μg, 5 μg, or 25 μg BV2373 with 50 μg saponin adjuvant or unadjuvanted 25 μg BV2373 on Day 0 and 21 (Week 0 and 3, respectively). Approximately 1 year later, all animals were boosted with one or two doses of 3 μg BV2438 with 50 μg saponin adjuvant on Day 318 and 339 (Weeks 45 and 48, respectively). PBMCs collected pre-boost (Day 303; Week 43), 7 days after the first rS-B.1.351 boost (Day 325; Week 46), and 35 days after the first rS-B.1.351 boost (Day 353; Week 50). PBMCs were stimulated with BV2373 or BV2438 and subjected to ELISA to measure (FIG. 59A) IFN-γ producing cells as a Th1 cytokine and (FIG. 59B) IL-4 producing cells as a Th2 cytokine. CD4+ T cells were also stimulated with BV2373 or BV2438, then subjected to ICS to measure cells producing IFN-γ (FIG. 59C), IL-2 (FIG. 59D), TNF-α (FIG. 59E), IL-5 (FIG. 59F), and IL-13 (FIG. 59G).

[0090] FIGS. 60A-B show SARS-CoV-2 variant neutralizing titers from human subjects immunized with BV2373. Serum samples from clinical study participants (n=30) were subjected to a PRNT assay to determine the presence of neutralizing antibodies against USA-WA1 compared to B.1.1.7 (FIG. 60A) and B.1.351 (FIG. 60B). Individual subjects' titers are shown with black circles, lines connect individuals' titers against USA-WA1 to their titer against the respective variant.

[0091] FIGS. 61A-B shows anti-S protein IgG titers before and after boost with BV2373 and a saponin adjuvant for the following SARS-CoV-2 variants: (i) SARS-CoV-2 virus having a CoV S polypeptide with a D614G mutation compared to the protein having an amino acid sequence of SEQ ID NO: 1; (ii) a SARS-CoV-2 alpha strain, a SARS-CoV-2 beta strain, and a SARS-CoV-2 delta strain. FIG. 61A shows the fold increase from day 35 to day 217. FIG. 61B shows the fold increase from day 189 to day 217.

[0092] FIGS. 62A-B shows the functional hACE2 inhibition before and after boost with BV2373 and a saponin adjuvant for the following SARS-CoV-2 variants: (i) SARS-CoV-2 virus having a CoV S polypeptide with a D614G mutation compared to the protein having an amino acid sequence of SEQ ID NO: 1; (ii) a SARS-CoV-2 alpha strain, a SARS-CoV-2 beta strain, and a SARS-CoV-2 delta strain. FIG. 62A shows the fold increase from day 35 to day 217. FIG. 62B shows the fold increase from day 189 to day 217.

[0093] FIG. 63 shows a diagram of booster dosing for participants of the trial described in Example 11.

[0094] FIGS. 64A-B show local (FIG. 64A) and systemic (FIG. 64B) reactogenicity of patients in Group B2 of the trial described in Example 11.

[0095] FIG. 65 shows serum IgG titers to the ancestral SARS-CoV-2 strain by study day of the patients described in Example 11.

[0096] FIG. 66 shows neutralizing antibody activity for the ancestral SARS-CoV-2 strain by study day of the patients described in Example 11.

[0097] FIG. 67 shows the neutralizing antibody 99 (neut99) values for the immunogenic composition comprising BV2373 and saponin adjuvant of Example 11 against the SARS-CoV-2 strain containing a D614G mutation and the B.1.617.2 (delta variant).

### DETAILED DESCRIPTION OF THE INVENTION

### Definitions

[0098] As used herein, and in the appended claims, the singular forms “a”, “an”, and “the” include plural referents unless the context clearly dictates otherwise. Thus, for example, reference to “a protein” can refer to one protein or to mixtures of such protein, and reference to “the method” includes reference to equivalent steps and/or methods known to those skilled in the art, and so forth.

[0099] As used herein, the term “adjuvant” refers to a compound that, when used in combination with an immunogen, augments or otherwise alters or modifies the immune response induced against the immunogen. Modification of the immune response may include intensification or broadening the specificity of either or both antibody and cellular immune responses.

[0100] As used herein, the term “about” or “approximately” when preceding a numerical value indicates the value plus or minus a range of 10%. For example, “about 100” encompasses 90 and 110.

[0101] As used herein, the terms “immunogen,” “antigen,” and “epitope” refer to substances such as proteins, including glycoproteins, and peptides that are capable of eliciting an immune response.

[0102] As used herein, an “immunogenic composition” is a composition that comprises an antigen where administration of the composition to a subject results in the development in the subject of a humoral and/or a cellular immune response to the antigen.

[0103] As used herein, a “subunit” composition, for example a vaccine, that includes one or more selected antigens but not all antigens from a pathogen. Such a composition is substantially free of intact virus or the lysate of such cells or particles and is typically prepared from at least partially purified, often substantially purified immunogenic polypeptides from the pathogen. The antigens in the subunit composition disclosed herein are typically prepared recombinantly, often using a baculovirus system.

[0104] As used herein, “substantially” refers to isolation of a substance (e.g. a compound, polynucleotide, or polypeptide) such that the substance forms the majority percent of the sample in which it is contained. For example, in a sample, a substantially purified component comprises 85%, preferably 85%-90%, more preferably at least 95%-99.5%, and most preferably at least 99% of the sample. If a component is substantially replaced the amount remaining in a sample is less than or equal to about 0.5% to about 10%, preferably less than about 0.5% to about 1.0%.

[0105] The terms “treat,” “treatment,” and “treating,” as used herein, refer to an approach for obtaining beneficial or desired results, for example, clinical results. For the purposes of this disclosure, beneficial or desired results may include inhibiting or suppressing the initiation or progression of an infection or a disease; ameliorating, or reducing the development of, symptoms of an infection or disease; or a combination thereof.

[0106] “Prevention,” as used herein, is used interchangeably with “prophylaxis” and can mean complete prevention of an infection or disease, or prevention of the development of symptoms of that infection or disease; a delay in the onset of an infection or disease or its symptoms; or a decrease in the severity of a subsequently developed infection or disease or its symptoms.

[0107] As used herein an “effective dose” or “effective amount” refers to an amount of an immunogen sufficient to induce an immune response that reduces at least one symptom of pathogen infection. An effective dose or effective amount may be determined e.g., by measuring amounts of neutralizing secretory and/or serum antibodies, e.g., by plaque neutralization, complement fixation, enzyme-linked immunosorbent (ELISA), or microneutralization assay.

[0108] As used herein, the term “vaccine” refers to an immunogenic composition, such as an immunogen derived from a pathogen, which is used to induce an immune response against the pathogen. The immune response may include formation of antibodies and/or a cell-mediated response. Depending on context, the term “vaccine” may also refer to a suspension or solution of an immunogen that is administered to a subject to produce an immune response. Preferably, vaccines induces an immune response that is effective at preventing infection from SARS-CoV-2 or a variant thereof.

[0109] As used herein, the term “subject” includes humans and other animals. Typically, the subject is a human. For example, the subject may be an adult, a teenager, a child (2 years to 14 years of age), an infant (birth to 2 year), or a neonate (up to 2 months). In particular aspects, the subject is up to 4 months old, or up to 6 months old. In aspects, the adults are seniors about 65 years or older, or about 60 years or older. In aspects, the subject is a pregnant woman or a woman intending to become pregnant. In other aspects, subject is not a human; for example a non-human primate; for example, a baboon, a chimpanzee, a gorilla, or a macaque. In certain aspects, the subject may be a pet, such as a dog or cat.

[0110] In aspects, the subject is immunocompromised. In embodiments, the immunocompromised subject is administered a medication that causes immunosuppression. Non-limiting examples of medications that cause immunosuppression include corticosteroids (e.g., prednisone), alkylating agents (e.g., cyclophosphamide), antimetabolites (e.g., azathioprine or 6-mercaptopurine), transplant-related immunosuppressive drugs (e.g., cyclosporine, tacrolimus, sirolimus, or mycophenolate mofetil), mitoxantrone, chemotherapeutic agents, methotrexate, tumor necrosis factor (TNF)-blocking agents (e.g., etanercept, adalimumab, infliximab). In embodiments, the immunocompromised subject is infected with a virus (e.g., human immunodeficiency virus or Epstein-Barr virus). In embodiments, the virus is a respiratory virus, such as respiratory syncytial virus, influenza, parainfluenza, adenovirus, or a picornavirus. In embodiments, the immunocompromised subject has acquired immunodeficiency syndrome (AIDS). In embodiments, the immunocompromised subject is a person living with human immunodeficiency virus (HIV). In embodiments, the immunocompromised subject is immunocompromised due to a treatment regiment designed to prevent inflammation or prevent rejection of a transplant. In embodiments, the immunocompromised subject is a subject who has received a transplant. In embodiments, the immunocompromised subject has undergone radiation therapy or a splenectomy. In embodiments, the immunocompromised subject has been diagnosed with cancer, an autoimmune disease, tuberculosis, a substance use disorder (e.g., an alcohol, opioid, or cocaine use disorder), stroke or cerebrovascular disease, a solid organ or blood stem cell transplant, sickle cell disease, thalassemia, autoimmune lymphoproliferative syndrome (ALPS), autoimmune polyglandular syndrome type 1 (APS-1), B-cell expansion with NF-kB and T-cell anergy (BENTA) disease, Caspase-8 deficiency state (CEDS), chronic granulomatous disease (CGD), common variable immunodeficiency (CVID), congenital neutropenia syndromes, a deficiency in the cytotoxic T-lymphocyte-associated antigen 4 (CTLA-4), a DOCK8 deficiency, a GATA2 deficiency, a glycosylation disorder with immunodeficiency, a hyper-immunoglobulin E syndrome (HIES), hyper-immunoglobulin M syndrome, diabetes, type 1 diabetes, type 2 diabetes, interferon gamma deficiency, interleukin 12 deficiency, interleukin 23 deficiency, leukocyte adhesion deficiency, lipopolysaccharide-responsive beige-like anchor (LRBA) deficiency, PI3 kinase disease, PLCG2-associated antibody deficiency and immune dysregulation (PLAID), severe combined immunodeficiency (SCID), STAT3 dominant-negative disease, STAT3 gain-of-function disease, warts, hypogammaglobulinemia, infections, and myelokathexis (WHIM) syndrome, Wisckott-Aldrich syndrome (WAS), X-linked agammaglobulinemia (XLA), X-linked lymphoproliferative disease (XLP), uremia, malnutrition, or XMEN disease. In embodiments, the immunocompromised subject is a current or former cigarette smoker. In embodiments, the immunocompromised subject has a B-cell defect, T-cell defect, macrophage defect, cytokine defect, phagocyte deficiency, phagocyte dysfunction, complement deficiency or a combination thereof.

[0111] In embodiments, the subject is overweight or obese. In embodiments, an overweight subject has a body mass index (BMI)≥25 kg/m² and <30 kg/m². In embodiments, an obese subject has a BMI that is ≥30 kg/m². In embodiments, the subject has a mental health condition. In embodiments, the mental health condition is depression, schizophrenia, or anxiety.

[0112] As used herein, the term “pharmaceutically acceptable” means being approved by a regulatory agency of a U.S. Federal or a state government or listed in the U.S. Pharmacopeia, European Pharmacopeia or other generally recognized pharmacopeia, for use in mammals, and more particularly in humans. These compositions can be useful as a vaccine and/or antigenic compositions for inducing a protective immune response in a vertebrate.

[0113] As used herein, the term “about” means plus or minus 10% of the indicated numerical value.

[0114] As used herein, the term “NVX-CoV2373” refers to a vaccine composition comprising the BV2373 Spike glycoprotein (SEQ ID NO: 87) and Fraction A and Fraction C iscom matrix (e.g., MATRIX-M™).

[0115] As used herein, the term “modification” as it refers to a CoV S polypeptide refers to mutation, deletion, or addition of one or more amino acids of the CoV S polypeptide. The location of a modification within a CoV S polypeptide can be determined based on aligning the sequence of the polypeptide to SEQ ID NO: 1 (CoV S polypeptide containing signal peptide) or SEQ NO: 2 (mature CoV S polypeptide lacking a signal peptide).

[0116] The term variant of SARS-CoV-2 used interchangeably herein with a “heterogeneous SARS-CoV-2 strain” is a SARS-CoV-2 virus comprising a CoV S polypeptide having at least about 2, at least about 3, at least about 4, at least about 5, at least about 6, at least about 7, at least about 8, at least about 9, at least about 10, at least about 11, at least about 12, at least about 13, at least about 14, at least about 15, at least about 16, at least about 17, at least about 18, at least about 19, at least about 20, at least about 21, at least about 22, at least about 23, at least about 24, at least about 25, at least about 26, at least about 27, at least about 28, at least about 29, at least about 30, at least about 31, at least about 32, at least about 33, at least about 34, or at least about 35 modifications, between about 2 and about 35 modifications, between about 5 and about 10 modifications, between about 5 and about 20 modifications, between about 10 and about 20 modifications, between about 15 and about 25 modifications, between about 20 and 30 modifications, between about 20 and about 40 modifications, between about 25 about 45 modifications, as compared to a CoV S polypeptide having the amino acid sequence of SEQ ID NO: 1 or SEQ ID NO: 2. In embodiments, the heterogeneous SARS-CoV-2 strain is a SARS-CoV-2 virus comprising a CoV S polypeptide with at least about 70%, at least about 75%, at least about 80%, at least about 85%, at least about 90%, at least about 95%, at least about 96%, at least about 97%, at least about 98%, or at least about 99% identity to a CoV S polypeptide having the amino acid sequence of SEQ ID NO: 1 or SEQ ID NO: 2. In embodiments, the heterogeneous SARS-CoV-2 strain is a SARS-CoV-2 virus comprising a CoV S polypeptide with between about 70% and about 99.9% identity to a CoV S polypeptide having the amino acid sequence of SEQ ID NO: 1 or SEQ ID NO: 2. In embodiments, the heterogeneous SARS-CoV-2 strain is a SARS-CoV-2 virus comprising a CoV S polypeptide with between about 70% and about 99.5% identity to a CoV S polypeptide having the ammo acid sequence of SEQ ID NO: 1 or SEQ ID NO: 2. In embodiments, the heterogeneous SARS-CoV-2 strain is a SARS-CoV-2 virus comprising a CoV S polypeptide with between about 90% and about 99.9% identity to a CoV S polypeptide having the amino acid sequence of SEQ ID NO: 1 or SEQ ID NO: 2. In embodiments, the heterogeneous SARS-CoV-2 strain is a SARS-CoV-2 virus comprising a CoV S polypeptide with between about 90% and about 99.8% identity to a CoV S polypeptide having the amino acid sequence of SEQ ID NO: 1 or SEQ ID NO: 2. In embodiments, the heterogeneous SARS-CoV-2 strain is a SARS-CoV-2 virus comprising a CoV S polypeptide with between about 95% and about 99.9% identity to a CoV S polypeptide having the amino acid sequence of SEQ ID NO: 1 or SEQ ID NO: 2. In embodiments, the heterogeneous SARS-CoV-2 strain is a SARS-CoV-2 virus comprising a CoV S polypeptide with between about 95% and about 99.8% identity to a CoV S polypeptide having the amino acid sequence of SEQ ID NO: 1 or SEQ ID NO: 2. In embodiments, the heterogeneous SARS-CoV-2 strain is a SARS-CoV-2 virus comprising a CoV S polypeptide with between about 95% and about 99% identity to a CoV S polypeptide having the amino acid sequence of SEQ ID NO: 1 or SEQ ID NO: 2.

[0117] The term “B.1.1.7 SARS-CoV-2 strain” (also referred to as an “alpha” strain) refers to a heterogenous SARS-CoV-2 strain having a CoV S polypeptide comprising deletions of amino acids 69, 70, and 144 and mutations of N501Y, A570D, D614G, P681H or P681R, T716I, S982A, and D1118H, wherein the CoV S polypeptide is numbered with respect to the wild-type SARS-CoV-2 S polypeptide having the amino acid sequence of SEQ ID NO: 1. The CoV S polypeptide of a B.1.1.7 SARS-CoV-2 strain may optionally contain a deletion of amino acid 145, mutation of E484K, L432R, or S494P, or a combination thereof.

[0118] The term “B.1.351 SARS-CoV-2 strain” (also referred to as a “beta” strain) refers to a heterogenous SARS-CoV-2 strain having a CoV S polypeptide comprising mutations of D80A, K417N, E484K, N501Y, D614G, and A701V, wherein the CoV S polypeptide is numbered with respect to the wild-type SARS-CoV-2 S polypeptide having the amino acid sequence of SEQ ID NO: 1. The CoV S polypeptide of a B.1.617.2 SARS-CoV-2 strain may optionally contain one or more of the following mutations: D215G; L242H; R246I; or deletion of 1, 2, or 3 amino acids of 241-243, wherein the CoV S polypeptide is numbered with respect to the wild-type SARS-CoV-2 S polypeptide having the amino acid sequence of SEQ ID NO: 1. In embodiments, the beta strain's CoV S polypeptide comprises mutations of D80A, D215G, L242H, K417N, E484K, N501Y, D614G, and A701V, wherein the CoV S polypeptide is numbered with respect to the wild-type SARS-CoV-2 S polypeptide having the amino acid sequence of SEQ ID NO: 1. In embodiments, the beta strain's CoV S polypeptide comprises mutations of D80A, D215G, deletion of 1, 2, or 3 amino acids of amino acids 241-243, K417N, E484K, N501Y, D614G, and A701V, wherein the CoV S polypeptide is numbered with respect to the wild-type SARS-CoV-2 S polypeptide having the amino acid sequence of SEQ ID NO: 1. In embodiments, the beta strain comprises mutations of D80A, L242H, R246I, N501Y, K417N, E484K, D614G, and A701V, wherein the CoV S polypeptide is numbered with respect to the wild-type SARS-CoV-2 S polypeptide having the amino acid sequence of SEQ ED NO: 1.

[0119] The term “P.1 SARS-CoV-2 strain” (also referred to as a “gamma” strain) refers to a heterogenous SARS-CoV-2 strain having a CoV S polypeptide containing the mutations L18F, T20N, P26S, D138Y, R190S, K417T, E484K, N501Y, D614G, H655Y, T1027I, and V1176F, wherein the CoV S polypeptide is numbered with respect to the wild-type SARS-CoV-2 S polypeptide having the amino acid sequence of SEQ ID NO: 1.

[0120] The term “Cal.20C SARS-CoV-2 strain” refers to a heterogeneous SARS-CoV-2 strain having a CoV S polypeptide containing the mutations S131, W152C, and L452R, wherein the CoV S polypeptide is numbered with respect to the wild-type SARS-CoV-2 S polypeptide having the amino acid sequence of SEQ ID NO: 1.

[0121] The term “B.1.617.2 strain” (also referred to as “delta” strain) refers to a heterogeneous SARS-CoV-2 strain having a CoV S polypeptide comprising deletions of amino acids 157 and 158 and mutations of T19R, E156G, L452R, T478K, D614G, P681R, and D950N, wherein the CoV S polypeptide is numbered with respect to the wild-type SARS-CoV-2 S polypeptide having the amino acid sequence of SEQ ID NO: 1. The CoV S polypeptide of a B.1.617.2 SARS-CoV-2 strain may optionally contain one or more of the following mutations: G142D; W64H; H66W; V70F; T95I; Y145H; D213V; L214R; A222V; W258I or W258L; K417N; N439K; E484K or E484Q; N501 Y; and Q613H, wherein the CoV S polypeptide is numbered with respect to the wild-type SARS-CoV-2 S polypeptide having the amino acid sequence of SEQ ID NO: 1. In embodiments, the delta strain comprises a CoV S polypeptide comprising deletions of amino acids 157 and 158 and mutations of T19R, G142D, E156G, L452R, T478K, D614G, P681R, and D950N. In embodiments, the delta strain comprises a CoV S polypeptide comprising deletions of amino acids 157 and 158 and mutations of T19R, T95I, G142D, Y145H, E156G, A222V, K417N L452R, T478K, D614G, P681R, and D950N, wherein the CoV S polypeptide is numbered with respect to the wild-type SARS-CoV-2 S polypeptide having the amino acid sequence of SEQ ID NO: 1. In embodiments, the delta strain comprises a CoV S polypeptide comprising deletions of amino acids 157 and 158 and mutations of T19R, G142D, E156G, W258I, K417N, N439K, L452R, T478K, E484K, N501Y, D614G, P681R, and D950N, wherein the CoV S polypeptide is numbered with respect to the wild-type SARS-CoV-2 S polypeptide having the amino acid sequence of SEQ ID NO: 1. In embodiments, the delta strain comprises a CoV S polypeptide comprising deletions of amino acids 157 and 158 and mutations of T19R, W64H, H66W, G142D, E156G, D213V, L214R, W258I, K417N, N439K, L452R, T478K, E484K, N501Y, D614G, P681R, and D950N, wherein the CoV S polypeptide is numbered with respect to the wild-type SARS-CoV-2 S polypeptide having the amino acid sequence of SEQ ID NO: 1. In embodiments, the delta strain comprises a CoV S polypeptide comprising deletions of amino acids 157 and 158 and mutations of T19R, G142D, K417N, L452R, T478K, E484Q, D614G, P681R, and D950N, wherein the CoV S polypeptide is numbered with respect to the wild-type SARS-CoV-2 S polypeptide having the amino acid sequence of SEQ ID NO: 1.

[0122] The term “B.1.525 strain” (also referred to as “eta” strain) refers to a heterogeneous SARS-CoV-2 strain having a CoV S polypeptide containing the mutations Q52R; A67V; E484K; D614G; Q677H; F888L; and deletion of 1, 2, 3, or 4 of amino acids 69, 70, 144, 145, wherein the CoV S polypeptide is numbered with respect to the wild-type SARS-CoV-2 S polypeptide having the amino acid sequence of SEQ ID NO: 1.

[0123] The term “B.1.526 strain” (also referred to as “iota” strain) refers to a heterogeneous SARS-CoV-2 strain having a CoV S polypeptide containing the mutations L5F; T95I; D253G; E484K; D614G; and A701V, wherein the CoV S polypeptide is numbered with respect to the wild-type SARS-CoV-2 S polypeptide having the amino acid sequence of SEQ ID NO: 1.

[0124] The term “B.1.617.1 strain” (also referred to as “kappa” strain) refers to a heterogeneous SARS-CoV-2 strain having a CoV S polypeptide containing the mutations L452R; E484Q; D614G; P681R; and Q1071H, wherein the CoV S polypeptide is numbered with respect to the wild-type SARS-CoV-2 S polypeptide having the amino acid sequence of SEQ ID NO: 1.

[0125] The term “C.37 strain” (also referred to as “lambda” strain) refers to a heterogeneous SARS-CoV-2 strain having a CoV S polypeptide containing the mutations G75V; T76I; R246N; L452Q; F490S; D614G; T859N; and deletion of 1, 2, 3, 4, 5, or 6 of amino acids 247-253, wherein the CoV S polypeptide is numbered with respect to the wild-type SARS-CoV-2 S polypeptide having the amino acid sequence of SEQ ID NO: 1.

[0126] The term “B.1.621 strain” (also referred to as “mu” strain) refers to a heterogeneous SARS-CoV-2 strain having a CoV S polypeptide containing the mutations T95I; Y144S; Y145N; R346K; E484K; N501Y; D614G; P681H; and D950N, wherein the CoV S polypeptide is numbered with respect to the wild-type SARS-CoV-2 S polypeptide having the amino acid sequence of SEQ ID NO: 1.

[0127] The term “efficacy” of an immunogenic composition or vaccine composition described herein refers to the percentage reduction of disease (e.g., COVID-19) in a group administered an immunogenic composition as compared to a group that is not administered the immunogenic composition. In embodiments, efficacy (E) is calculated using the following equation: E (%)=(1−RR)×100, where RR=relative risk of incidence rates between the group administered the immunogenic composition and the group that is not administered the immunogenic composition. In embodiments, immunogenic compositions described herein have an efficacy against a SARS-CoV-2 virus or heterogeneous SARS-CoV-2 strain that is at least about 50%, at least about 55%, at least about 60%, at least about 65%, at least about 70%, at least about 75%, at least about 80%, at least about 85%, at least about 90%, at least about 91%, at least about 92%, at least about 93%, at least about 94%, at least about 95%, at least about 96%, at least about 97%, at least about 98%, at least about 99%, between about 50% and about 99%, between about 50% and about 98%, between about 60% and about 99%, between about 60% and about 98%, between about 70% and about 98%, between about 70% and about 95%, between about 70% and about 99%, between about 80% and about 99%, between about 80% and about 98%, between about 80% and about 95%, between about 85% and about 99%, between about 85% and about 98%, between about 85% and about 95%, between about 90% and about 95%, between about 90% and 98%, or between about 90% and about 99%

[0128] A subject that is “positive” for SARS-CoV-2 or a variant thereof has a positive PCR or serological test for SARS-CoV-2 or a variant thereof. A positive PCR test detects genetic material from SARS-CoV-2 or a variant thereof. A positive serological test shows the presence of antibodies against a SARS-CoV-2 protein, typically the nucleocapsid protein from SARS-CoV-2 or a variant thereof.

[0129] The term “asymptomatic” refers to a subject that is positive for SARS-CoV-2 or a SARS-CoV-2 variant thereof, but does not experience any symptoms of COVID-19.

[0130] The term “mild” as it refers to COVID-19 refers to a subject that has a positive or serological test for SARS-CoV-2 or a variant thereof and has one or more of the following symptoms: (i) fever; (ii) new onset cough; (iii) or two additional COVID-19 symptoms selected from new onset or worsening of shortness of breath or difficulty breathing; fatigue; generalized muscle or body aches; headache; loss of taste or smell; sore throat, congestion, or runny nose; or nausea, vomiting, or diarrhea.

[0131] The term “moderate” as it refers to COVID-19 refers to a subject that has a positive PCR or serological test for SARS-CoV-2 or a variant thereof and one or more of the following symptoms: (i) a high fever of ≥38.4° C. for three or more days; (ii) any evidence of significant lower respiratory tract infection (LRTI), wherein the evidence is selected from: (a) shortness of breath with or without exertion; (b) tachypnea (24 to 29 breaths per minute at rest); (c) SpO2 of 94% to 95%; (d) an abnormal chest x-ray or computerized tomography (CT) consistent with pneumonia or LRTI; or (e) adventitious sounds on lung auscultation (e.g., crackles/rales, wheeze, rhonchi, pleural rub, stridor).

[0132] The term “severe” as it refers to COVID-19 refers to a subject that has a positive PCR or serological test for SARS-CoV-2 or a variant thereof and one or more of the following symptoms: (i) tachypnea of ≥30 breaths per minute at rest; (ii) resting heart rate of ≥125 beats per minute; (iii) SpO2 of ≤93% or PaO2/FiO2<300 mmHg; (iv) requirement for high flow oxygen therapy or non-invasive ventilation, non-invasive positive pressure ventilation (e.g., continuous positive airway pressure (CPAP) or bilevel positive airway pressure (BiPAP)); (v) requirement for mechanical ventilation or extracorporeal membrane oxygenation (ECMO); (vi) one or more major organ system dysfunctions or failure selected from (a) acute respiratory failure, including acute respiratory distress syndrome (ARDS); (b) acute renal failure; (c) acute hepatic failure; (d) acute right or left heart failure; (e) septic or cardiogenic shock (with shock defined as systolic blood pressure (SBP) of <90 mmHg or diastolic blood pressure (DBP) or <60 mmHg); (f) acute stroke (ischemic or hemorrhagic); (g) acute thrombotic event, such as acute myocardial infarction (AMI), deep vein thrombosis (DVT), or pulmonary embolism (PE); (h) a requirement for vasopressors, systemic corticosteroids, or hemodialysis; (vii) admission to an intensive care unit; or (viii) death.

### Vaccine Compositions Containing Coronavirus (CoV) Spike (S) Proteins

[0133] The disclosure provides non-naturally occurring coronavirus (CoV) Spike (S) polypeptides, nanoparticles containing CoV S polypeptides, and immunogenic compositions and vaccine compositions containing either non-naturally occurring CoV S polypeptides or nanoparticles containing CoV S polypeptides. In embodiments, provided herein are methods of using CoV S polypeptides, nanoparticles, immunogenic compositions, and vaccine compositions to stimulate an immune response.

[0134] Also provided herein are methods of manufacturing the nanoparticles and vaccine compositions. Advantageously, the methods provide nanoparticles that are substantially free from contamination by other proteins, such as proteins associated with recombinant expression of proteins in insect cells. In embodiments, expression occurs in baculovirus/Sf9 systems.

### CoV S Polypeptide Antigens

[0135] The vaccine compositions of the disclosure contain non-naturally occurring CoV S polypeptides. CoV S polypeptides may be derived from coronaviruses, including but not limited to SARS-CoV-2, for example from SARS-CoV-2, from MERS CoV, and from SARS CoV. In embodiments, the CoV S polypeptide is derived from a variant of SARS-CoV-2. In embodiments, the variant of SARS-CoV-2 is SARS-CoV-2 VUI 202012/01, B.1.1.7 (also called “501Y.V1” and “alpha”), B.1.351 (also called “501Y.V2” and “beta”), B.1.617.2 (also called “delta”), Cal.20C (also called “epsilon”), or P.1 (also called “gamma”). The variant of SARS-CoV-2 is designated by a World Health Organization (WHO) label (e.g., alpha, beta, gamma, delta, etc.), by its Phylogenetic Assignment of Named Global Outbreak (PANGO) lineage, by its GISAID clade, or by its Nextstrain clade.

[0136] The table below provides a list of variant SARS-CoV-2 strains:

| | | | | | Optional |
|---|---|---|---|---|---|
| | | | | Modifications | Modifications |
| WHO | Pango | GISAID | Nextstrain | compared to | compared to |
| label | lineage* | clade | clade | SEQ ID NO: 1 | SEQ ID NO: 1 |
| Alpha | B.1.1.7 | GRY | 20I (V1) | Deletion of | Deletion of |
| | | | | amino acids 69 | amino acid |
| | | | | and 70; | 145; E484K; |
| | | | | deletion of | L432R, S494P |
| | | | | amino acids 144; | |
| | | | | N501Y; A570D; | |
| | | | | D614G; P681H or | |
| | | | | P681R, T716I; | |
| | | | | S982A; and D1118H | |
| Beta | B.1.351 | GH/501Y.V2 | 20H (V2) | D80A; K417N; | D215G; L242H; |
| | | | | E484K; N501Y; | R246I; |
| | | | | D614G; A701V; | Deletion of 1, |
| | | | | | 2, or 3 amino |
| | | | | | acids of 241-243 |
| Gamma | P.1 | GR/501Y.V3 | 20J (V3) | L18F; T20N; | |
| | | | | P26S, D138Y; | |
| | | | | R190S; K417T; | |
| | | | | E484K; N501Y; | |
| | | | | D614G; H655Y; | |
| | | | | T1027I; and | |
| | | | | V1176F | |
| Delta | B.1.617.2 | G/478K.V1 | 21A, 21I, | T19R; E156G; | G142D; |
| | | | 21J | deletion of | W64H; H66W; |
| | | | | amino acids | V70F; T95I; |
| | | | | 157 and 158; | Y145H; D213V; |
| | | | | L452R; T478K; | L214R; A222V; |
| | | | | D614G; P681R; | W258I or W258L; |
| | | | | D950N | K417N; N439K; |
| | | | | | E484K or E484Q; |
| | | | | | N501Y; Q613H |
| Eta | B.1.525 | | | Q52R; A67V; | |
| | | | | deletions of | |
| | | | | amino acids | |
| | | | | 69-70; | |
| | | | | deletions of | |
| | | | | amino acids | |
| | | | | 144-145; | |
| | | | | E484K; D614G; | |
| | | | | Q677H; F888L | |
| Iota | B.1.526 | | | L5F, T95I, | |
| | | | | D253G; E484K; | |
| | | | | D614G; A701V | |
| Kappa | B.1.617.1 | | | L452R; E484Q; | |
| | | | | D614G; P681R; | |
| | | | | Q1071H | |
| Lambda | C.37 | | | G75V, T76I, | |
| | | | | R246N, | |
| | | | | deletion of 1, | |
| | | | | 2, 3, 4, 5, or 6 | |
| | | | | amino acids of | |
| | | | | 247-253; | |
| | | | | L452Q; F490S; | |
| | | | | D614G; T859N | |
| Mu | B.1.621 | | | T95I; Y144S; | |
| | | | | Y145N; R346K; | |
| | | | | E484K; N501Y; | |
| | | | | D614G; P681H; | |
| | | | | D950N | |

[0137] In embodiments, the SARS-CoV-2 virus has a CoV S polypeptide having the amino acid sequence of SEQ ID NO: 1, and the variant of SARS-CoV-2 comprises a CoV S polypeptide having at least about 1, at least about 2, at least about 3, at least about 4, at least about 5, at least about 6, at least about 7, at least about 8, at least about 9, at least about 10, at least about 11, at least about 12, at least about 13, at least about 14, at least about 15, at least about 16, at least about 17, at least about 18, at least about 19, at least about 20, at least about 21, at least about 22, at least about 23, at least about 24, at least about 25, at least about 26, at least about 27, at least about 28, at least about 29, at least about 30, at least about 31, at least about 32, at least about 33, at least about 34, at least about 35 modifications, at least about 36, at least about 37, at least about 38, at least about 39, at least about 40, at least about 41, at least about 42, at least about 43, at least about 44, at least about 45, at least about 46, at least about 47, at least about 48, at least about 49, at least about 50, at least about 51, at least about 52, at least about 53, at least about 54, at least about 55, at least about 56, at least about 57, at least about 58, at least about 59, or at least about 60 modifications compared to SEQ ID NO: 1.

[0138] In contrast, to the SARS-CoV S protein, the SARS-CoV-2 S protein has a four amino acid insertion in the S1/S2 cleavage site resulting in a polybasic RRAR furin-like cleavage motif. The SARS-CoV-2 S protein is synthesized as an inactive precursor (S0) that is proteolytically cleaved at the furin cleavage site into S1 and S2 subunits which remain non-covalently linked to form prefusion trimers. The S2 domain of the SARS-CoV-2 S protein comprises a fusion peptide (FP), two heptad repeats (HR1 and HR2), a transmembrane (TM) domain, and a cytoplasmic tail (CT). The S1 domain of the SARS-CoV-2 S protein folds into four distinct domains: the N-terminal domain (NTD) and the C-terminal domain, which contains the receptor binding domain (RBD) and two subdomains SD1 and SD2. The prefusion SARS-CoV-2 S protein trimers undergo a structural rearrangement from a prefusion to a postfusion conformation upon S-protein receptor binding and cleavage.

[0139] In embodiments, the CoV S polypeptides are glycoproteins, due to post-translational glycosylation. The glycoproteins comprise one or more of a signal peptide, an S1 subunit, an S2 subunit, a NTD, a, RBD, two subdomains (SD1 and SD2, labeled SD1/2 in FIGS. 46A-B and referred to as “SD1/2” herein), an intact or modified fusion peptide, an HR1 domain, an HR2 domain, a TM, and a CD. In embodiments, the amino acids for each domain are given in FIG. 2 and FIG. 46A (shown according to SEQ ID NO: 1), FIG. 46B (shown according to SEQ ID NO: 2), and FIG. 3 (shown corresponding to SEQ ID NO: 1). In embodiments, each domain may have at least 90%, at least 91%, at least 92%, at least 93%, at least 94%, at least 95%, at least 96%, at least 97%, at least 98%, at least 99%, or at least 99.5% identity to the sequences for each domain as in SEQ ID NO: 1 or SEQ ID NO: 2. Each domain may have a deletion, an insertion, or mutation of up to about 1, up to about 2, up to about 3, up to about 4, up to about 5, up to about 10, up to about 20, up to about 30, up to about 35, up to about 40, up to about 45, up to about 50, up to about 55, up to about 60, up to about 65, or up to about 70 amino acids compared to those shown in SEQ ID NO: 1 or SEQ ID NO: 2. Each domain may have a deletion, an insertion, or mutation of between about 1 and about 5 amino acids, between about 3 and about 10 amino acids, between about 5 and about 10 amino acids, between about 8 and about 12 amino acids, between about 10 and about 15 amino acids, between about 12 and about 17 amino acids, between about 15 and about 20 amino acids, between about 18 and about 23 amino acids, between about 20 and about 25 amino acids, between about 22 and about 27 amino acids, between about 25 and about 30 amino acids, between about 30 and about 35 amino acids, between about 35 and about 40 amino acids, between about 40 and about 45 amino acids, between about 45 and about 50 amino acids, between about 50 and about 55 amino acids, or between about 55 and about 60 amino acids as compared to those shown in SEQ ID NO: 1 or SEQ ID NO: 2. Note that FIGS. 2 and 3 illustrate the 13-amino acid N-terminal signal peptide that is absent from the mature peptide. The CoV S polypeptides may be used to stimulate immune responses against the native CoV Spike (S) polypeptide.

[0140] In embodiments, the native CoV Spike (S) polypeptide (SEQ ID NO: 2) is modified resulting in non-naturally occurring CoV Spike (S) polypeptides (FIG. 1). In embodiments, the CoV Spike (S) glycoproteins comprise a S1 subunit and a S2 subunit, wherein the S1 subunit comprises an NTD, an RBD, a SD1/2, and an inactive furin cleavage site (amino acids 669-672), and wherein the S2 subunit comprises mutations of amino acids 973 and 974;

[0141] wherein the NTD (amino acids 1-318) optionally comprises one or more modifications selected from the group consisting of:
[0142] (a) deletion of one or more amino acids selected from the group consisting of amino acid 56, 57, 131, 132, 144, 145, 228, 229, 230, 231, 234, 235, 236, 237, 238, 239, 240 and combinations thereof;
[0143] (b) insertion of 1, 2, 3, or 4 amino acids after amino acid 132; and

[0144] (c) mutation of one or more amino acids selected from the group consisting of amino acid 5, 6, 7, 13, 39, 51, 53, 54, 56, 57, 62, 63, 67, 82, 125, 129, 131, 132, 133, 139, 143, 144, 145, 177, 200, 201, 202, 209, 229, 233, 240, 245, and combinations thereof;

[0145] wherein the RBD optionally comprises mutation of one or more amino acids selected from the group consisting of amino acid 333. 404, 419, 426, 439, 440, 464, 465. 471, 477, 481, 488, and combinations thereof;

[0146] wherein the SD1/2 domain optionally comprises mutation of one or more amino acids selected from the group consisting of 557, 600, 601, 642, 664, 668, and combinations thereof; and

[0147] wherein the S2 subunit optionally comprises one or more modifications selected from the group consisting of:
[0148] (a) deletion of one or more amino acids from 676-685, 676-702, 702-711, 775-793, 806-815 and combinations thereof;
[0149] (b) mutation of one or more amino acids selected from the group consisting of 688, 703, 846, 875, 937, 969, 973, 974, 1014, 1058, 1105, and 1163 and combinations thereof; and

[0150] (c) deletion of one or more amino acids from the transmembrane and cytoplasmic domain (TMCT) (amino acids 1201-1260),

wherein the amino acids of the CoV S glycoprotein are numbered with respect to SEQ ID NO: 2.

[0151] FIG. 3 shows a CoV S polypeptide called BV2378, which has an inactive furin cleavage site, deleted fusion peptide (e.g., deletion of amino acids 819-828), a K986P, and a V987 mutation, wherein the amino acids are numbered with respect to SEQ ID NO: 1. The mature BV2378 polypeptide lacks one or more amino acids of the signal peptide, which are amino acids 1-13 of SEQ ID NO: 1.

[0152] In embodiments, the CoV S polypeptides described herein exist in a prefusion conformation. In embodiments, the CoV S polypeptides described herein comprise a flexible HR2 domain. Unless otherwise mentioned, the flexibility of a domain is determined by transition electron microscopy (TEM) and 2D class averaging. A reduction in electron density corresponds to a flexible domain.

### CoV S Polypeptide Antigens—Modifications to S1 Subunit

[0153] In embodiments, the CoV S polypeptides contain one or more modifications to the S1 subunit having an amino acid sequence of SEQ ID NO: 121.

[0154] The amino acid sequence of the S1 subunit (SEQ ID NO: 121) is shown below.

QCVNLTTRTQLPPAYTNSFTRGVYYPDKVFRSSVLHSTQDLFLPFFSNV
TWFHAIHVSGTNGTKRFDNPVLPFNDGVYFASTEKSNIIRGWIFGTTLD
SKTQSLLIVNNATNVVIKVCEFQFCNDPFLGVYYHKNNKSWMESEFRVY
SSANNCTFEYVSQPFLMDLEGKQGNFKNLREFVFKNIDGYFKIYSKHTP
INLVRDLPQGFSALEPLVDLPIGINITRFQTLLALHRSYLTPGDSSSGW
TAGAAAYYVGYLQPRTFLLKYNENGTITDAVDCALDPLSETKCTLKSFT
VEKGIYQTSNFRVQPTESIVRFPNITNLCPFGEVFNATRFASVYAWNRK
RISNCVADYSVLYNSASFSTFKCYGVSPTKLNDLCFTNVYADSFVIRGD
EVRQIAPGQTGKIADYNYKLPDDFTGCVIAWNSNNLDSKVGGNYNYLYR
LFRKSNLKPFERDISTEIYQAGSTPCNGVEGFNCYFPLQSYGFQPTNGV
GYQPYRVVVLSFELLHAPATVCGPKKSTNLVKNKCVNFNFNGLTGTGVL
TESNKKFLPFQQFGRDIADTTDAVRDPQTLEILDITPCSFGGVSVITPG
TNTSNQVAVLYQDVNCTEVPVAIHADQLTPTWRVYSTGSNVFQTRAGCL
IGAEHVNNSYECDIPIGAGICASYQTQTNSPRRAR

[0155] Underlined regions of SEQ ID NO: 121 represent amino acids within the S1 subunit that may be modified.

[0156] In embodiments, the CoV S polypeptides described herein comprise an S1 subunit with at least 95%, at least 96%, at least 97%, at least 98%, at least 99%, or at least 99.5%, identity to the S1 subunit of SEQ ID NO: 1 or SEQ ID NO: 2. The S1 subunit may have a deletion, an insertion, or mutation of up to about 1, up to about 2, up to about 3, up to about 4, up to about 5, up to about 10, up to about 15, up to about 20, up to about 25, or up to about 30 amino acids compared to the amino acid sequence of the S1 subunit of SEQ ID NO: 1 or SEQ ID NO: 2. The S1 subunit may have a deletion, an insertion, or mutation of between about 1 and about 5 amino acids, between about 3 and about 10 amino acids, between about 5 and 10 amino acids, between about 8 and 12 amino acids, between about 10 and 15 amino acids, between about 12 and 17 amino acids, between about 15 and 20 amino acids, between about 18 and 23 amino acids, between about 20 and 25 amino acids, between about 22 and about 27 amino acids, or between about 25 and 30 amino acids as compared to the S1 subunit of SEQ ID NO: 1 or SEQ ID NO: 2.

[0157] In embodiments, the S1 subunit may contain any combination of modifications shown in Table 1A.

TABLE 1A
Modifications to S1 (SEQ ID NO: 121)

| Position | Position | Position | |
|---|---|---|---|
| within | within | within | |
| SEQ ID | SEQ ID | SEQ ID | |
| NO: 1 | NO: 2 | NO: 121 | Potential Modifications |
| 14-305 | 1-292 | 1-292 | deletion of up to about 1, 2, 3, 4, 5, 10, |
| | | | 20, 30, 40, 50, 60, 70, 80, 90, 100, 110, |
| | | | 120, 130, 140, 150, 160, 170, 180, 190, |
| | | | 200, 210, 220, 230, 240, 250, 260, 270, |
| | | | 280, 290, or 292 amino acids |
| 18 | 5 | 5 | mutation to phenylalanine |
| | | | mutation to tyrosine |
| | | | mutation to tryptophan |
| 19 | 6 | 6 | mutation to arginine |
| | | | mutation to lysine |
| | | | mutation to histidine |
| 20 | 7 | 7 | mutation to asparagine |
| | | | mutation to glutamine |
| | | | mutation to isoleucine |
| | | | mutation to valine |
| 26 | 13 | 13 | mutation to serine |
| | | | mutation to threonine |
| 52 | 39 | 39 | mutation to arginine |
| | | | mutation to lysine |
| | | | mutation to histidine |
| 64 | 51 | 51 | mutation to histidine |
| | | | mutation to lysine |
| | | | mutation to arginine |
| 66 | 53 | 53 | mutation to tryptophan |
| | | | mutation to tyrosine |
| | | | mutation to phenylalanine |
| 67 | 54 | 54 | mutation to valine |
| | | | mutation to isoleucine |
| | | | mutation to leucine |
| 69 | 56 | 56 | Deletion of amino acid |
| 70 | 57 | 57 | Deletion of amino acid |
| | | | Mutation to phenylalanine |
| | | | Mutation to tyrosine |
| | | | Mutation to tryptophan |
| 75 | 62 | 62 | Mutation to valine |
| | | | Mutation to leucine |
| | | | Mutation to isoleucine |
| 76 | 63 | 63 | Mutation to isoleucine |
| | | | Mutation to valine |
| | | | Mutation to leucine |
| 80 | 67 | 67 | mutation to alanine |
| | | | mutation to glycine |
| 95 | 82 | 82 | mutation to beta branched amino acid |
| | | | mutation to isoleucine |
| | | | mutation to valine |
| 138 | 125 | 125 | mutation to tyrosine |
| | | | mutation to phenylalanine |
| | | | mutation to tryptophan |
| 142 | 129 | 129 | mutation to aspartic acid |
| | | | mutation to glutamic acid |
| 144 | 131 | 131 | Deletion of amino acid |
| | | | Mutation to serine |
| 145 | 132 | 132 | Deletion of amino acid |
| | | | Mutation to histidine |
| | | | Mutation to asparagine |
| | | | Mutation to glutamine |
| | | | insertion of 1, 2, 3, or 4 amino acids |
| | | | after amino acid 132 |
| | | | (e.g., asparagine) |
| 146 | 133 | 133 | mutation to aromatic amino acid |
| | | | mutation to tyrosine |
| | | | mutation to phenylalanine |
| | | | mutation to tryptophan |
| 152 | 139 | 139 | mutation to cysteine |
| | | | mutation to methionine |
| | | | mutation to serine |
| | | | mutation to threonine |
| 156 | 143 | 143 | mutation to glycine |
| | | | mutation to alanine |
| 157 | 144 | 144 | deletion of amino acid |
| 158 | 145 | 145 | deletion of amino acid |
| 190 | 177 | 177 | mutation to serine |
| | | | mutation to threonine |
| | | | mutation to cysteine |
| 213 | 200 | 200 | mutation to valine |
| | | | mutation to leucine |
| | | | mutation to isoleucine |
| | | | mutation to beta branched amino acid |
| 214 | 201 | 201 | mutation to arginine |
| | | | mutation to lysine |
| | | | mutation to histidine |
| 215 | 202 | 202 | mutation to glycine |
| | | | mutation to alanine |
| 222 | 209 | 209 | mutation to valine |
| | | | mutation to leucine |
| | | | mutation to isoleucine |
| 241-244 | 228-231 | 228-231 | deletion of 1, 2, 3, or 4 amino acids |
| 242 | 229 | 229 | mutation to histidine |
| | | | mutation to lysine |
| | | | mutation to arginine |
| 246 | 233 | 233 | mutation to beta-branched amino acid |
| | | | mutation to isoleucine |
| | | | mutation to valine |
| | | | mutation to threonine |
| | | | mutation to asparagine |
| 247 | 234 | 234 | deletion of amino acid |
| 248 | 235 | 235 | deletion of amino acid |
| 249 | 236 | 236 | deletion of amino acid |
| 250 | 237 | 237 | deletion of amino acid |
| 251 | 238 | 238 | deletion of amino acid |
| 252 | 239 | 239 | deletion of amino acid |
| 253 | 240 | 240 | mutation to glycine |
| | | | deletion of amino acid |
| 258 | 245 | 245 | mutation to isoleucine |
| | | | mutation to valine |
| | | | mutation to leucine |
| | | | mutation to beta branched amino acid |
| 346 | 333 | 333 | mutation to lysine |
| | | | mutation to arginine |
| | | | mutation to histidine |
| 417 | 404 | 404 | mutation to asparagine |
| | | | mutation to threonine |
| | | | mutation to isoleucine |
| | | | mutation to valine |
| | | | mutation to serine |
| | | | mutation to glutamine |
| | | | mutation to beta-branched amino acid |
| 432 | 419 | 419 | mutation to lysine |
| | | | mutation to arginine |
| | | | mutation to histidine |
| 439 | 426 | 426 | mutation to lysine |
| | | | mutation to arginine |
| | | | mutation to histidine |
| 452 | 439 | 439 | mutation to arginine |
| | | | mutation to lysine |
| | | | mutation to histidine |
| | | | mutation to glutamine |
| | | | mutation to asparagine |
| 453 | 440 | 440 | mutation to phenylalanine |
| | | | mutation to tryptophan |
| 477 | 464 | 464 | mutation to asparagine |
| | | | mutation to glutamine |
| 478 | 465 | 465 | mutation to lysine |
| | | | mutation to arginine |
| | | | mutation to histidine |
| 484 | 471 | 471 | mutation to lysine |
| | | | mutation to arginine |
| | | | mutation to histidine |
| | | | mutation to glutamine |
| | | | mutation to asparagine |
| 490 | 477 | 477 | mutation to serine |
| | | | mutation to threonine |
| 494 | 481 | 481 | mutation to proline |
| 501 | 488 | 488 | mutation to tyrosine |
| | | | mutation to phenylalanine |
| | | | mutation to tryptophan |
| 570 | 557 | 557 | Mutation to aspartic acid |
| | | | Mutation to glutamic acid |
| 613 | 600 | 600 | Mutation to histidine |
| | | | Mutation to lysine |
| | | | Mutation to arginine |
| 614 | 601 | 601 | Mutation to glycine |
| | | | Mutation to alanine |
| 655 | 642 | 642 | Mutation to tyrosine |
| | | | Mutation to phenylalanine |
| | | | Mutation to tryptophan |
| 677 | 664 | 664 | Mutation to histidine |
| 681 | 668 | 668 | Mutation to histidine |
| | | | Mutation to lysine |
| | | | Mutation to arginine |
| 682-685 | 669-672 | 669-672 | inactive furin cleavage site (See Table 1E) |

* amino acids 14-685 of SEQ ID NO: 1 and amino acids 1-672 of SEQ ID NO: 2

### CoV S Polypeptide Antigens—Modifications to S1 Subunit—NTD

[0158] In embodiments, the CoV S polypeptides contain one or more modifications to the NTD. In embodiments, the NTD has an amino acid sequence of SEQ ID NO: 118, which corresponds to amino acids 14-305 of SEQ ID NO: 1 or amino acids 1-292 of SEQ ID NO: 2.

[0159] The amino acid sequence of an NTD (SEQ ID NO: 118) is shown below.

QCVNLTTRTQLPPAYTNSFTRGVYYPDKVFRSSVLHSTQDLFLPFFSNV
TWFHAIHVSGTNGTKRFDNPVLPFNDGVYFASTEKSNIIRGWIFGTTLD
SKTQSLLIVNNATNVVIKVCEFQFCNDPFLGVYYHKNNKSWMESEFRVY
SSANNCTFEYVSQPFLMDLEGKQGNFKNLREFVFKNIDGYFKIYSKHTP
INLVRDLPQGFSALEPLVDLPIGINITRFQTLLALHRSYLTPGDSSSGW
TAGAAAYYVGYLQPRTFLLKYNENGTITDAVDCALDPLSETKCTLKS

[0160] In embodiments, the NTD has an amino acid sequence of SEQ ID NO: 45, which corresponds to amino acids 14 to 331 of SEQ ID NO: 1 or amino acids 1-318 of SEQ ID NO: 2. The amino acid sequence of an NTD (SEQ ID NO: 45) is shown below.

QCVNLTTRTQLPPAYTNSFTRGVYYPDKVFRSSVLHSTQDLFLPFFSNV
TWFHAIHVSGTNGTKRFDNPVLPFNDGVYFASTEKSNIIRGWIFGTTLD
SKTQSLLIVNNATNVVIKVCEFQFCNDPFLGVYYHKNNKSWMESEFRVY
SSANNCTFEYVSQPFLMDLEGKQGNFKNLREFVFKNIDGYFKIYSKHTP
INLVRDLPQGFSALEPLVDLPIGINITRFQTLLALHRSYLTPGDSSSGW
TAGAAAYYVGYLQPRTFLLKYNENGTITDAVDCALDPLSETKCTLKSFT
VEKGIYQTSNFRVQPTESIVRFPN

[0161] In embodiments, the NTD and RBD overlap by up to about 1 amino acid, up to about 5 amino acids, up to about 10 amino acids, or up to about 20 amino acids.

[0162] In embodiments, an NTD as provided herein may be extended at the C-terminus by up to 5, up to 10, up to 15, up to 20, up to 25, or up to 30 amino acids.

[0163] In embodiments, the CoV S polypeptides described herein comprise a NTD with at least 95%, at least 96%, at least 97%, at least 98%, at least 99%, or at least 99.5%, identity to the NTD of SEQ ID NO: 1 or SEQ ID NO: 2. The NTD may have a deletion, an insertion, or mutation of up to about 1, up to about 2, up to about 3, up to about 4, up to about 5, up to about 10, up to about 15, up to about 20, up to about 25, or up to about 30 amino acids compared to the amino acid sequence of the NTD of SEQ ID NO: 1 or SEQ ID NO: 2. The NTD may have a deletion, an insertion, or mutation of between about 1 and about 5 amino acids, between about 3 and about 10 amino acids, between about 5 and 10 amino acids, between about 8 and 12 amino acids, between about 10 and 15 amino acids, between about 12 and 17 amino acids, between about 15 and 20 amino acids, between about 18 and 23 amino acids, between about 20 and 25 amino acids, between about 22 and about 27 amino acids, or between about 25 and 30 amino acids as compared to the NTD of SEQ ID NO: 1 or SEQ ID NO: 2.

[0164] In embodiments, the CoV S polypeptides contain a deletion of one or more amino acids from the N-terminal domain (NTD) (corresponding to amino acids 1-292 of SEQ ID NO: 2. In embodiments, the CoV S polypeptides contain a deletion of up to about 10, 20, 30, 40, 50, 60, 70, 80, 90, 100, 110, 120, 130, 140, 150, 160, 170, 180, 190, 200, 210, 220, 230, 240, 250, 260, 270, 280, 290, or 292 amino acids of the NTD.

[0165] In embodiments, the CoV S polypeptides contain a deletion of one or more amino acids from the NTD (corresponding to amino acids 1-318 of SEQ ID NO: 2). In embodiments, the CoV S polypeptides contain a deletion of amino acids 1-318 of the NTD of SEQ ID NO: 2. In embodiments, deletion of the NTD enhances protein expression of the COV Spike (S) polypeptide. In embodiments, the CoV S polypeptides which have an NTD deletion have amino acid sequences represented by SEQ ID NOS: 46, 48, 49, 51, 52, and 54. In embodiments, the CoV S polypeptides which have an NTD deletion are encoded by an isolated nucleic acid sequence selected from the group consisting of SEQ ID NO: 47, SEQ ID NO: 50, and SEQ ID NO: 53.

[0166] In embodiments, the NTD may contain any combination of modifications shown in Table 1B. The modifications are shown with respect to SEQ ID NO:2, the mature S polypeptide sequence for reference.

TABLE 1B
Modifications to NTD (SEQ ID NO: 118)

| | | SEQ ID | |
|---|---|---|---|
| Position | | NO: 121 | |
| within | SEQ ID | or SEQ ID | |
| SEQ ID | NO: 2 | NO: 45 | |
| NO: 1 | residue | residue | Modifications |
| 18 | 5 | 5 | mutation to phenylalanine |
| | | | mutation to tyrosine |
| | | | mutation to tryptophan |
| 19 | 6 | 6 | mutation to arginine |
| | | | mutation to lysine |
| | | | mutation to histidine |
| 20 | 7 | 7 | mutation to asparagine |
| | | | mutation to glutamine |
| | | | mutation to isoleucine |
| | | | mutation to valine |
| 26 | 13 | 13 | mutation to serine |
| | | | mutation to threonine |
| 64 | 51 | 51 | mutation to histidine |
| | | | mutation to lysine |
| | | | mutation to arginine |
| 66 | 53 | 53 | mutation to tryptophan |
| | | | mutation to tyrosine |
| | | | mutation to phenylalanine |
| 69 | 56 | 56 | Deletion of amino acid |
| 70 | 57 | 57 | Deletion of amino acid |
| | | | Mutation to phenylalanine |
| | | | Mutation to tyrosine |
| | | | Mutation to tryptophan |
| 75 | 62 | 62 | Mutation to valine |
| | | | Mutation to leucine |
| | | | Mutation to isoleucine |
| 76 | 63 | 63 | Mutation to isoleucine |
| | | | Mutation to valine |
| | | | Mutation to leucine |
| 80 | 67 | 67 | mutation to alanine |
| | | | mutation to glycine |
| 95 | 82 | 82 | mutation to beta branched amino acid |
| | | | mutation to isoleucine |
| | | | mutation to valine |
| 138 | 125 | 125 | mutation to tyrosine |
| | | | mutation to phenylalanine |
| | | | mutation to tryptophan |
| 142 | 129 | 129 | mutation to aspartic acid |
| | | | mutation to glutamic acid |
| 144 | 131 | 131 | Deletion of amino acid |
| | | | Mutation to serine |
| 145 | 132 | 132 | Deletion of amino acid |
| | | | Mutation to histidine |
| | | | Mutation to asparagine |
| | | | Mutation to glutamine |
| | | | insertion of 1, 2, 3, or 4 amino |
| | | | acids after this position |
| 146 | 133 | 133 | Mutation to aromatic amino acid |
| | | | Mutation to tyrosine |
| | | | Mutation to phenylalanine |
| | | | Mutation to tryptophan |
| 152 | 139 | 139 | mutation to cysteine |
| | | | mutation to methionine |
| | | | mutation to serine |
| | | | mutation to threonine |
| | | | mutation to arginine |
| 156 | 143 | 143 | mutation to glycine |
| | | | mutation to alanine |
| 157 | 144 | 144 | deletion of amino acid |
| 158 | 145 | 145 | deletion of amino acid |
| 190 | 177 | 177 | mutation to serine |
| | | | mutation to threonine |
| | | | mutation to cysteine |
| 213 | 200 | 200 | mutation to valine |
| | | | mutation to leucine |
| | | | mutation to isoleucine |
| | | | mutation to beta branched amino acid |
| 214 | 201 | 201 | mutation to arginine |
| | | | mutation to lysine |
| | | | mutation to histidine |
| 215 | 202 | 202 | mutation to glycine |
| | | | mutation to alanine |
| 222 | 209 | 209 | mutation to valine |
| | | | mutation to leucine |
| | | | mutation to isoleucine |
| 242 | 229 | 229 | mutation to histidine |
| | | | mutation to lysine |
| | | | mutation to arginine |
| 241-244 | 228-231 | 228-231 | deletion of 1, 2, 3, or 4 amino acids |
| 246 | 233 | 233 | mutation to beta-branched amino acid |
| | | | mutation to isoleucine |
| | | | mutation to valine |
| | | | mutation to threonine |
| | | | mutation to asparagine |
| 247 | 234 | 234 | deletion of amino acid |
| 248 | 235 | 235 | deletion of amino acid |
| 249 | 236 | 236 | deletion of amino acid |
| 250 | 237 | 237 | deletion of amino acid |
| 251 | 238 | 238 | deletion of amino acid |
| 252 | 239 | 239 | deletion of amino acid |
| 253 | 240 | 240 | mutation to glycine |
| | | | deletion of amino acid |
| 258 | 245 | 245 | mutation to isoleucine |
| | | | mutation to valine |
| | | | mutation to leucine |
| | | | mutation to beta branched amino acid |

* amino acids 14-305 of SEQ ID NO: 1 and amino acids 1-292 of SEQ ID NO: 2

### CoV S Polypeptide Antigens—Modifications to S1 Subunit—RBD

[0167] In embodiments, the CoV S polypeptides contain one or more modifications to the RBD.

[0168] In embodiments, the RBD has an amino acid sequence of SEQ ID NO: 126, which corresponds to amino acids 331-527 of SEQ ID NO: 1 or amino acids 318-514 of SEQ ID NO: 2.

The amino acid sequence of the RBD is shown below:
(SEQ ID NO: 126)
NITNLCPFGEVFNATRFASVYAWNRKRISNCVADYSVLYNSASFSTFKC
YGVSPTKLNDLCFTNVYADSFVIRGDEVRQIAPGQTGKIADYNYKLPDD
FTGCVIAWNSNNLDSKVGGNYNYLYRLFRKSNLKPFERDISTEIYQAGS
TPCNGVEGFNCYFPLQSYGFQPTNGVGYQPYRVVVLSFELLHAPATVCG
P

In embodiments, the RBD has an amino acid sequence of SEQ ID NO: 116, which corresponds to amino acids 335-530 of SEQ ID NO: 1 or amino acids 322-517 of SEQ NO: 2.

[0169] The amino acid sequence of the RBD (SEQ ID NO: 116) is shown below.

LCPFGEVFNATRFASVYAWNRKRISNCVADYSVLYNSASFSTFKCYGVS
PTKLNDLCFTNVYADSFVIRGDEVRQIAPGQTGKIADYNYKLPDDFTGC
VIAWNSNNLDSKVGGNYNYLYRLFRKSNLKPFERDISTEIYQAGSTPCN
GVEGFNCYFPLQSYGFQPTNGVGYQPYRVVVLSFELLHAPATVCGPKKS

[0170] In embodiments, an RBD as provided herein may be extended at the N-terminus or C-terminus by up to 1 amino acid, up to 5 amino acids, up to 10 amino acids, up to 15 amino acids, up to 20 amino acids, up to 25 amino acids, or up to 30 amino acids.

[0171] In embodiments, the CoV S polypeptides described herein comprise a RBD with at least 95%, at least 96%, at least 97%, at least 98%, at least 99%, or at least 99.5%, identity to the RBD of SEQ ID NO: 1 or SEQ ID NO: 2. The RBD may have a deletion, an insertion, or mutation of up to about 1, up to about 2, up to about 3, up to about 4, up to about 5, up to about 10, up to about 15, up to about 20, up to about 25, or up to about 30 amino acids compared to the amino acid sequence of the RBD of SEQ ID NO: 1 or SEQ ID NO: 2. The RBD may have a deletion, an insertion, or mutation of between about 1 and about 5 amino acids, between about 3 and about 10 amino acids, between about 5 and 10 amino acids, between about 8 and 12 amino acids, between about 10 and 15 amino acids, between about 12 and 17 amino acids, between about 15 and 20 amino acids, between about 18 and 23 amino acids, between about 20 and 25 amino acids, between about 22 and about 27 amino acids, or between about 25 and 30 amino acids as compared to the RBD of SEQ ID NO: 1 or SEQ ID NO: 2.

[0172] In embodiments, the CoV S polypeptide has at least one, at least two, at least three, at least four, at least four, at least 5, at least 6, at least 7, at least 8, at least 9, at least 10, at least 11, at least 12, at least 13, at least 14, at least 15, at least 16, at least 17, at least 18, at least 19, or at least 20 mutations in the RBD. In embodiments, the RBD may contain any combination of modifications as shown in Table 1C.

TABLE 1C
Modifications to RBD (SEQ ID NO: 126)

| Position | Position | Position | |
|---|---|---|---|
| within | within | within | |
| SEQ ID | SEQ ID | SEQ ID | |
| NO: 1 | NO: 2 | NO: 126 | Potential Modifications |
| 346 | 333 | 16 | mutation to lysine |
| | | | mutation to arginine |
| | | | mutation to histidine |
| 417 | 404 | 87 | mutation to asparagine |
| | | | mutation to threonine |
| | | | mutation to isoleucine |
| | | | mutation to valine |
| | | | mutation to serine |
| | | | mutation to glutamine |
| | | | mutation to beta-branched amino acid |
| 432 | 419 | 102 | mutation to lysine |
| | | | mutation to arginine |
| | | | mutation to histidine |
| 439 | 426 | 109 | mutation to lysine |
| | | | mutation to arginine |
| | | | mutation to histidine |
| 452 | 439 | 122 | mutation to arginine |
| | | | mutation to lysine |
| | | | mutation to histidine |
| | | | mutation to glutamine |
| | | | mutation to asparagine |
| 453 | 440 | 123 | mutation to phenylalanine |
| | | | mutation to tryptophan |
| 477 | 464 | 147 | mutation to asparagine |
| | | | mutation to glutamine |
| 478 | 465 | 148 | mutation to lysine |
| | | | mutation to arginine |
| | | | mutation to histidine |
| 484 | 471 | 154 | mutation to lysine |
| | | | mutation to arginine |
| | | | mutation to histidine |
| | | | mutation to glutamine |
| | | | mutation to asparagine |
| 490 | 477 | 160 | mutation to serine |
| | | | mutation to threonine |
| 494 | 481 | 164 | mutation to proline |
| 501 | 488 | 171 | mutation to tyrosine |
| | | | mutation to phenylalanine |
| | | | mutation to tryptophan |

* amino acids 331-527 of SEQ ID NO: 1 and amnio acids 318-514 of SEQ ID NO: 2

### CoV S Polypeptide Antigens—Modifications to SD1/2

[0173] In embodiments, the CoV S polypeptides contain one or more modifications to the SD1/2 domain having an amino acid sequence of SEQ ID NO: 122, which corresponds to amino acids 542-681 of SEQ ID NO: 1 or amino acids 529-668 of SEQ ID NO: 2.

[0174] The amino acid sequence of the SD1/2 (SEQ ID NO: 122) domain is shown below.

NFNGLTGTGVLTESNKKFLPFQQFGRDIADTTDAVRDPQTLEILDITPC
SFGGVSVITPGTNTSNQVAVLYQDVNCTEVPVAIHADQLTPTWRVYSTG
SNVFQTRAGCLIGAEHVNNSYECDIPIGAGICASYQTQTNSP

[0175] In embodiments, the CoV S polypeptides described herein comprise a SD1/2 domain with at least 95%, at least 96%, at least 97%, at least 98%, at least 99%, or at least 99.5%, identity to the SD1/2 of SEQ ID NO: 1 or SEQ ID NO: 2. The SD1/2 domain may have a deletion, an insertion, or mutation of up to about 1, up to about 2, up to about 3, up to about 4, up to about 5, up to about 10, up to about 15, up to about 20, up to about 25, or up to about 30 amino acids compared to the amino acid sequence of the SD1/2 of SEQ ID NO: 1 or SEQ ID NO: 2. The SD1/2 domain may have a deletion, an insertion, or mutation of between about 1 and about 5 amino acids, between about 3 and about 10 amino acids, between about 5 and 10 amino acids, between about 8 and 12 amino acids, between about 10 and 15 amino acids, between about 12 and 17 amino acids, between about 15 and 20 amino acids, between about 18 and 23 amino acids, between about 20 and 25 amino acids, between about 22 and about 27 amino acids, or between about 25 and 30 amino acids as compared to the SD1/2 domain of SEQ ID NO: 1 or SEQ ID NO: 2.

[0176] In embodiments, the CoV S polypeptide has at least one, at least two, at least three, at least four, at least four, at least 5, at least 6, at least 7, at least 8, at least 9, at least 10, at least 11, at least 12, at least 13, at least 14, at least 15, at least 16, at least 17, at least 18, at least 19, or at least 20 mutations in the SD1/2 domain. In embodiments, the SD1/2 domain may contain any combination of modifications as shown in Table 1D.

TABLE 1D
Modifications to SD1/2 (SEQ ID NO: 122)

| Position | Position | Position | |
|---|---|---|---|
| within | within | within | |
| SEQ ID | SEQ ID | SEQ ID | |
| NO: 1 | NO: 2 | NO: 122 | Potential Modifications |
| 570 | 557 | 29 | Mutation to aspartic acid |
| | | | Mutation to glutamic acid |
| 613 | 600 | 600 | Mutation to histidine |
| | | | Mutation to lysine |
| | | | Mutation to arginine |
| 614 | 601 | 73 | Mutation to glycine |
| | | | Mutation to alanine |
| 655 | 642 | 114 | Mutation to tyrosine |
| | | | Mutation to phenylalanine |
| | | | Mutation to tryptophan |
| 677 | 664 | 664 | Mutation to histidine |
| 681 | 668 | 140 | Mutation to histidine |
| | | | Mutation to lysine |
| | | | Mutation to arginine |

* amino acids 542-681 of SEQ ID NO: 1 or amino acids 529-668 of SEQ ID NO: 2

### CoV S Polypeptide Antigens—Modifications to Furin Cleavage Site

[0177] In embodiments, the CoV S polypeptides contain a furin site (RRAR), which corresponds to amino acids 682-685 of SEQ ID NO: 1 or amino acids 669-672 of SEQ ID NO: 2, that is inactivated by one or more mutations. Inactivation of the furin cleavage site prevents furin from cleaving the CoV S polypeptide. In embodiments, the CoV S polypeptides described herein which contain an inactivated furin cleavage site are expressed as a single chain.

[0178] In embodiments, one or more of the amino acids comprising the native furin cleavage site is mutated to any natural amino acid. In embodiments, the amino acids are L-amino acids. Non-limiting examples of amino acids include alanine, arginine, glycine, asparagine, aspartic acid, cysteine, glutamine, glutamic acid, serine, threonine, histidine, lysine, methionine, proline, valine, isoleucine, leucine, tyrosine, tryptophan, and phenylalanine.

[0179] In embodiments, one or more of the amino acids comprising the native furin cleavage site is mutated to glutamine. In embodiments, 1, 2, 3, or 4 amino acids may be mutated to glutamine. In embodiments, one of the arginines comprising the native furin cleavage site is mutated to glutamine. In embodiments, two of the arginines comprising the native furin cleavage site are mutated to glutamine. In embodiments, three of the arginines comprising the native furin cleavage site are mutated to glutamine.

[0180] In embodiments, one or more of the amino acids comprising the native furin cleavage site, is mutated to alanine. In embodiments, 1, 2, 3, or 4 amino acids may be mutated to alanine. In embodiments, one of the arginines comprising the native furin cleavage site is mutated to alanine. In embodiments, two of the arginines comprising the native furin cleavage site are mutated to alanine. In embodiments, three of the arginines comprising the native furin cleavage site are mutated to alanine.

[0181] In embodiments, one or more of the amino acids in the native furin cleavage site is mutated to glycine. In embodiments, 1, 2, 3, or 4 amino acids may be mutated to glycine. In embodiments, one of the arginines of the native furin cleavage site is mutated to glycine. In embodiments, two of the arginines in the native furin cleavage site are mutated to glycine. In embodiments, three of the arginines comprising the native furin cleavage site are mutated to glycine.

[0182] In embodiments, one or more of the amino acids in the native furin cleavage site, is mutated to asparagine. For example 1, 2, 3, or 4 amino acids may be mutated to asparagine. In embodiments, one of the arginines in the native furin cleavage site is mutated to asparagine. In embodiments, two of the arginines in the native furin cleavage site are mutated to asparagine. In embodiments, three of the arginines in the native furin cleavage site are mutated to asparagine.

[0183] Non-limiting examples of the amino acid sequences of the inactivated furin sites contained within the CoV S polypeptides are found in Table 1E.

TABLE 1E

| Amino Acid Sequence of | Active or Inactive |
|---|---|
| Furin Cleavage Site | Furin Cleavage Site |
| RRAR (SEQ ID NO: 6) | Active |
| QQAQ (SEQ ID NO: 7) | Inactive |
| QRAR (SEQ ID NO: 8) | Inactive |
| RQAR (SEQ ID NO: 9) | Inactive |
| RRAQ (SEQ ID NO: 10) | Inactive |
| QQAR (SEQ ID NO: 11) | Inactive |
| RQAQ (SEQ ID NO: 12) | Inactive |
| QRAQ (SEQ ID NO: 13) | Inactive |
| NNAN (SEQ ID NO: 14) | Inactive |
| NRAR (SEQ ID NO: 15) | Inactive |
| RNAR (SEQ ID NO: 16) | Inactive |
| RRAN (SEQ ID NO: 17) | Inactive |
| NNAR (SEQ ID NO: 18) | Inactive |
| RNAN (SEQ ID NO: 19) | Inactive |
| NRAN (SEQ ID NO: 20) | Inactive |
| AAAA (SEQ ID NO: 21) | Inactive |
| ARAR (SEQ ID NO: 22) | Inactive |
| RAAR (SEQ ID NO: 23) | Inactive |
| RRAA (SEQ ID NO: 24) | Inactive |
| AAAR (SEQ ID NO: 25) | Inactive |
| RAAA (SEQ ID NO: 26) | Inactive |
| ARAA (SEQ ID NO: 27) | Inactive |
| GGAG (SEQ ID NO: 28) | Inactive |
| GRAR (SEQ ID NO: 29) | Inactive |
| RGAR (SEQ ID NO: 30) | Inactive |
| RRAG (SEQ ID NO: 31) | Inactive |
| GGAR (SEQ ID NO: 32) | Inactive |
| RGAG (SEQ ID NO: 33) | Inactive |
| GRAG (SEQ ID NO: 34) | Inactive |
| GSAS (SEQ ID NO: 97) | Inactive |
| GSGA (SEQ ID NO: 111) | Inactive |

[0184] In embodiments, in lieu of an active furin cleavage site (SEQ ID NO: 6) the CoV S polypeptides described herein contain an inactivated furin cleavage site. In embodiments, the amino acid sequence of the inactivated furin cleavage site is represented by any one of SEQ ID NO: 7-34 or SEQ ID NO: 97. In embodiments, the amino acid sequence of the inactivated furin cleavage site is QQAQ (SEQ ID NO: 7). In embodiments, the amino acid sequence of the inactivated furin cleavage site is GSAS (SEQ ID NO: 97). In embodiments, the amino acid sequence of the inactivated furin cleavage site is GSGA (SEQ ID NO: 111). In embodiments, the amino acid sequence of the inactivated furin cleavage site is GG, GGG (SEQ ID NO: 127), GGGG (SEQ ID NO: 128), or GGGGG (SEQ ID NO: 129).

### CoV S Polypeptide Antigens—Modifications to S2 Subunit

[0185] In embodiments, the CoV S polypeptides contain one or more modifications to the S2 subunit having an amino acid sequence of SEQ ID NO: 120, which corresponds to amino acids 686-1273 of SEQ ID NO: 1 or amino acids 673-1260 of SEQ ID NO: 2.

[0186] The amino acid sequence of the S2 subunit (SEQ ID NO: 120) is shown below.

SVASQSIIAYTMSLGAENSVAYSNNSIAIPTNFTISVTTEILPVSMTKT
SVDCTMYICGDSTECSNLLLQYGSFCTQLNRALTGIAVEQDKNTQEVFA
QVKQIYKTPPIKDFGGFNFSQILPDPSKPSKRSFIEDLLFNKVTLADAG
FIKQYGDCLGDIAARDLICAQKFNGLTVLPPLLTDEMIAQYTSALLAGT
ITSGWTFGAGAALQIPFAMQMAYRFNGIGVTQNVLYENQKLIANQFNSA
IGKIQDSLSSTASALGKLQDVVNQNAQALNTLVKQLSSNFGAISSVLND
ILSRLDKVEAEVQIDRLITGRLQSLQTYVTQQLIRAAEIRASANLAATK
MSECVLGQSKRVDFCGKGYHLMSFPQSAPHGVVFLHVTYVPAQEKNFTT
APAICHDGKAHFPREGVFVSNGTHWFVTQRNFYEPQIITTDNTFVSGNC
DVVIGIVNNTVYDPLQPELDSFKEELDKYFKNHTSPDVDLGDISGINAS
VVNIQKEIDRLNEVAKNLNESLIDLQELGKYEQYIKWPWYIWLGFIAGL
IAIVMVTIMLCCMTSCCSCLKGCCSCGSCCKFDEDDSEPVLKGVKLHYT

[0187] In embodiments, the CoV S polypeptides described herein comprise an S2 subunit with at least 95%, at least 96%, at least 97%, at least 98%, at least 99%, or at least 99.5%, identity to the S2 subunit of SEQ ID NO: 1 or SEQ ID NO: 2. The S2 subunit may have a deletion, an insertion, or mutation of up to about 1, up to about 2, up to about 3, up to about 4, up to about 5, up to about 10, up to about 15, up to about 20, up to about 25, or up to about 30 amino acids compared to the amino acid sequence of the S2 subunit of SEQ ID NO: 1 or SEQ ID NO: 2. The S2 subunit may have a deletion, an insertion, or mutation of between about 1 and about 5 amino acids, between about 3 and about 10 amino acids, between about 5 and 10 amino acids, between about 8 and 12 amino acids, between about 10 and 15 amino acids, between about 12 and 17 amino acids, between about 15 and 20 amino acids, between about 18 and 23 amino acids, between about 20 and 25 amino acids, between about 22 and about 27 amino acids, or between about 25 and 30 amino acids as compared to the S2 subunit of SEQ ID NO: 1 or SEQ ID NO: 2.

[0188] In embodiments, the S2 subunit may contain any combination of modifications as shown in Table 1F.

TABLE 1F
Modifications to S2 (SEQ ID NO: 120)

| Position | Position | Position | |
|---|---|---|---|
| within | within | within | |
| SEQ ID | SEQ ID | SEQ ID | |
| NO: 1 | NO: 2 | NO: 120 | Possible Modifications |
| 689-698 | 676-685 | 4-13 | Deletion of up to about 1, up to |
| | | | about 2, up to about 3, up to about |
| | | | 4, up to about 5, up to about 6, |
| | | | up to about 7, up to about 8, up to |
| | | | about 9, or up to about 10 amino |
| | | | acids |
| 701 | 688 | 16 | Mutation to beta-branched amino acid |
| | | | Mutation to valine |
| | | | Mutation to isoleucine |
| | | | Mutation to threonine |
| 715-724 | 702-711 | 30-39 | Deletion of up to about 1, up to |
| | | | about 2, up to about 3, up to about |
| | | | 4, up to about 5, up to about 6, |
| | | | up to about 7, up to about 8, up to |
| | | | about 9, or up to about 10 amino |
| | | | acids |
| 716 | 703 | 31 | Mutation to beta-branched amino acid |
| | | | Mutation to valine |
| | | | Mutation to isoleucine |
| 788-806 | 775-793 | 103-121 | Deletion of up to about 1, up to |
| | | | about 2, up to about 3, up to about |
| | | | 4, up to about 5, up to about 6, |
| | | | up to about 7, up to about 8, up to |
| | | | about 9, up to about 10, up to about |
| | | | 11, up to about 12, up to about 13, |
| | | | up to about 14, up to about 15, up to |
| | | | about 16, up to about 17, up to about |
| | | | 18, or up to about 19 amino acids |
| 819-828 | 806-815 | 134-143 | Deletion of up to about 1, up to |
| | | | about 2, up to about 3, up to about |
| | | | 4, up to about 5, up to about 6, |
| | | | up to about 7, up to about 8, up to |
| | | | about 9, or up to about 10 amino |
| | | | acids |
| 859 | 846 | 174 | Mutation to asparagine |
| | | | Mutation to glutamine |
| 888 | 875 | 203 | Mutation to leucine |
| | | | Mutation to isoleucine |
| | | | Mutation to valine |
| 950 | 937 | 265 | Mutation to asparagine |
| | | | Mutation to glutamine |
| 982 | 969 | 297 | Mutation to alanine |
| | | | Mutation to glycine |
| | | | Mutation to threonine |
| 986 | 973 | 301 | Mutation to proline |
| | | | Mutation to glycine |
| 987 | 974 | 302 | Mutation to proline |
| | | | Mutation to glycine |
| 1027 | 1014 | 342 | Mutation to isoleucine |
| | | | Mutation to valine |
| | | | Mutation to serine |
| 1071 | 1058 | 386 | Mutation to histidine |
| | | | Mutation to arginine |
| | | | Mutation to lysine |
| 1118 | 1105 | 433 | Mutation to histidine |
| | | | Mutation to lysine |
| | | | Mutation to arginine |
| | | | Mutation to asparagine |
| | | | Mutation to glutamine |
| 1176 | 1163 | 491 | Mutation to phenylalanine |
| | | | Mutation to tyrosine |
| | | | Mutation to tryptophan |
| 1214-1237 | 1201-1224 | 1-24 | Deletion of one or more amino |
| | | | acids of TM |
| 1238-1273 | 1225-1260 | 1-36 | Deletion of one or more amino |
| | | | acids of CD |

* ammo acids 686-1273 of SEQ ID NO: 1 and amino acids 673-1260 of SEQ ID NO: 2

[0189] In embodiments, the CoV S polypeptides contain a deletion, corresponding to one or more deletions within amino acids 676-685 of the native CoV Spike (S) polypeptide (SEQ ID NO: 2). In embodiments, 1, 2, 3, 4, 5, 6, 7, 8, 9, or 10 amino acids of amino acids 676-685 of the native CoV Spike (S) polypeptide (SEQ ID NO:2) are deleted. In embodiments, the deletions of amino acids within amino acids 676-685 are consecutive e.g. amino acids 676 and 677 are deleted or amino acids 680 and 681 are deleted. In embodiments, the deletions of amino acids within amino acids 676-685 are non-consecutive e.g. amino acids 676 and 680 are deleted or amino acids 677 and 682 are deleted. In embodiments, CoV S polypeptides containing a deletion, corresponding to one or more deletions within amino acids 676-685, have an amino acid sequence selected from the group consisting of SEQ ID NO: 62 and SEQ ID NO: 63.

[0190] In embodiments, the CoV S polypeptides contain a deletion, corresponding to one or more deletions within amino acids 702-711 of the native CoV Spike (S) polypeptide (SEQ ID NO: 2). In embodiments, 1, 2, 3, 4, 5, 6, 7, 8, 9, or 10 amino acids of amino acids 702-711 of the native SARS-CoV-2 Spike (S) polypeptide (SEQ ID NO:2) are deleted. In embodiments, the one or more deletions of amino acids within amino acids 702-711 are consecutive e.g. amino acids 702 and 703 are deleted or amino acids 708 and 709 are deleted. In embodiments, the deletions of amino acids within amino acids 702-711 are non-consecutive e.g. amino acids 702 and 704 are deleted or amino acids 707 and 710 are deleted. In embodiments, the CoV S polypeptides containing a deletion, corresponding to one or more deletions within amino acids 702-711, have an amino acid sequence selected from the group consisting of SEQ ID NO: 64 and SEQ ID NO: 65.

[0191] In embodiments, the CoV S polypeptides contain a deletion, corresponding to one or more deletions within amino acids 775-793 of the native CoV S polypeptide (SEQ ID NO: 2). In embodiments, up to about 1, 2, 3, 4, 5, 6, 7, 8, 9, 10, 11, 12, 13, 14, 15, 16, 17, 18, or 19 amino acids of amino acids 775-793 of the native SARS-CoV-2 Spike (S) polypeptide (SEQ ID NO:2) are deleted. In embodiments, the one or more deletions of amino acids within amino acids 775-793 are consecutive e.g. amino acids 776 and 777 are deleted or amino acids 780 and 781 are deleted. In embodiments, the deletions of amino acids within amino acids 775-793 are non-consecutive e.g. amino acids 775 and 790 are deleted or amino acids 777 and 781 are deleted.

[0192] In embodiments, the CoV S polypeptides contain a deletion of the fusion peptide (SEQ ID NO: 104), which corresponds to amino acids 806-815 of SEQ ID NO: 2. In embodiments, 1, 2, 3, 4, 5, 6, 7, 8, 9, or 10 amino acids of the fusion peptide of the CoV Spike (S) polypeptide (SEQ ID NO:2) are deleted. In embodiments, the deletions of amino acids within the fusion peptide are consecutive e.g. amino acids 806 and 807 are deleted or amino acids 809 and 810 are deleted. In embodiments, the deletions of amino acids within the fusion peptide are non-consecutive e.g. amino acids 806 and 808 are deleted or amino acids 810 and 813 are deleted. In embodiments, the CoV S polypeptides containing a deletion, corresponding to one or more amino acids of the fusion peptide, have an amino acid sequence selected from SEQ ID NOS: 66, 77, and 105-108.

[0193] In embodiments, the CoV S polypeptides contain a mutation at Lys-973 of the native CoV Spike (S) polypeptide (SEQ ID NO: 2). In embodiments, Lys-973 is mutated to any natural amino acid. In embodiments, Lys-973 is mutated to proline. In embodiments, Lys-973 is mutated to glycine. In embodiments, the CoV S polypeptides containing a mutation at amino acid 973 are selected from the group consisting of SEQ ID NO: 84-89, 105-106, and 109-110.

[0194] In embodiments, the CoV S polypeptides contain a mutation at Val-974 of the native CoV Spike (S) polypeptide (SEQ ID NO: 2). In embodiments, Val-974 is mutated to any natural amino acid. In embodiments, Val-974 is mutated to proline. In embodiments, Val-974 is mutated to glycine. In embodiments, the CoV S polypeptides containing a mutation at amino acid 974 are selected from the group consisting of SEQ ID NO: 84-89, 105-106, and 109-110.

[0195] In embodiments, the CoV S polypeptides contain a mutation at Lys-973 and Val-974 of the native CoV Spike (S) polypeptide (SEQ ID NO: 2). In embodiments, Lys-973 and Val-974 are mutated to any natural amino acid. In embodiments, Lys-973 and Val-974 are mutated to proline. In embodiments, the CoV S polypeptides containing a mutation at amino acids 973 and 974 are selected from SEQ ID NOS: 84-89, 105-106, and 109-110.

### CoV S Polypeptide Antigens—Modifications to S2 Subunit—HR1 Domain

[0196] In embodiments, the CoV S polypeptides contain one or more modifications to the HR1 domain having an amino acid sequence of SEQ ID NO: 119, which corresponds to amino acids 912-984 of SEQ ID NO: 1 or amino acids 889-971 of SEQ ID NO: 2.

[0197] The amino acid sequence of the HR1 domain (SEQ ID NO: 119) is shown below.

MAYRFNGIGVTQNVLYENQKLIANQFNSAIGKIQDSLSSTASALGKLQD
VVNQNAQALNTLVKQLSSNFGAISSVLNDILSRL

[0198] In embodiments, the CoV S polypeptides described herein comprise an HR1 domain with at least 95%, at least 96%, at least 97%, at least 98%, at least 99%, or at least 99.5%, identity to the HR1 domain of SEQ ID NO: 1 or SEQ ID NO: 2. The HR1 domain may have a deletion, an insertion, or mutation of up to about 1, up to about 2, up to about 3, up to about 4, up to about 5, up to about 10, up to about 15, up to about 20, up to about 25, or up to about 30 amino acids compared to the amino acid sequence of the HR1 domain of SEQ ID NO: 1 or SEQ ID NO: 2. The HR1 domain may have a deletion, an insertion, or mutation of between about 1 and about 5 amino acids, between about 3 and about 10 amino acids, between about 5 and 10 amino acids, between about 8 and 12 amino acids, between about 10 and 15 amino acids, between about 12 and 17 amino acids, between about 15 and 20 amino acids, between about 18 and 23 amino acids, between about 20 and 25 amino acids, between about 22 and about 27 amino acids, or between about 25 and 30 amino acids as compared to the HR1 domain of SEQ ID NO: 1 or SEQ ID NO: 2.

[0199] In embodiments, the HR1 domain may contain any combination of modifications as shown in Table 1G.

TABLE 1G
Modifications to HR1 (SEQ ID NO: 119)

| Position | Position | Position | |
|---|---|---|---|
| within | within | within | |
| SEQ ID | SEQ ID | SEQ ID | |
| NO: 1 | NO: 2 | NO: 119 | Possible Modifications |
| 982 | 969 | 81 | Mutation to alanine |
| | | | Mutation to glycine |
| | | | Mutation to threonine |

* amino acids 912-984 of SEQ ID NO: 1 and amino acids 889-971 of SEQ ID NO: 2)

### CoV S Polypeptide Antigens—Modifications to S2 Subunit—HR2 Domain

[0200] In embodiments, the CoV S polypeptides contain one or more modifications to the HR2 domain having an amino acid sequence of SEQ ID NO: 125, which corresponds to amino acids 1163-1213 of SEQ ID NO: 1 or amino acids 1150-1200 of SEQ ID NO: 2.

[0201] The amino acid sequence of the HR2 domain (SEQ ID NO: 125) is shown below.

DVDLGDISGINASVVNIQKEIDRLNEVAKNLNESLIDLQELGKYEQYIK
WP

[0202] In embodiments, the CoV S polypeptides described herein comprise an HR2 domain with at least 95%, at least 96%, at least 97%, at least 98%, at least 99%, or at least 99.5%, identity to the HR2 domain of SEQ ID NO: 1 or SEQ ID NO: 2. The HR2 domain may have a deletion, an insertion, or mutation of up to about 1, up to about 2, up to about 3, up to about 4, up to about 5, up to about 10, up to about 15, up to about 20, up to about 25, or up to about 30 amino acids compared to the amino acid sequence of the HR2 domain of SEQ ID NO: 1 or SEQ ID NO: 2. The HR2 domain may have a deletion, an insertion, or mutation of between about 1 and about 5 amino acids, between about 3 and about 10 amino acids, between about 5 and 10 amino acids, between about 8 and 12 amino acids, between about 10 and 15 amino acids, between about 12 and 17 amino acids, between about 15 and 20 amino acids, between about 18 and 23 amino acids, between about 20 and 25 amino acids, between about 22 and about 2.7 amino acids, or between about 25 and 30 amino acids as compared to the HR2 domain of SEQ ID NO: 1 or SEQ ID NO: 2.

### CoV S Polypeptide Antigens—Modifications to the TM Domain

[0203] In embodiments, the CoV S polypeptides contain one or more modifications to the TM domain having an amino acid sequence of SEQ ID NO: 123, which corresponds to amino acids 1214-1237 of SEQ ID NO: 1 or amino acids 1201-1224 of SEQ ID NO: 2.

[0204] The amino acid sequence of the TM domain (SEQ ID NO: 123) is shown below.

WYIWLGFIAGLIAIVMVTIMLCCM

[0205] In embodiments, the CoV S polypeptides described herein comprise a TM domain with at least 95%, at least 96%, at least 97%, at least 98%, at least 99%, or at least 99.5%, identity to the TM domain of SEQ ID NO: 1 or SEQ ID NO: 2. The TM domain may have a deletion, an insertion, or mutation of up to about 1, up to about 2, up to about 3, up to about 4, up to about 5, up to about 10, up to about 15, up to about 20, up to about 25, or up to about 30 amino acids compared to the amino acid sequence of the TM domain of SEQ ID NO: 1 or SEQ ID NO: 2. The TM domain may have a deletion, an insertion, or mutation of between about 1 and about 5 amino acids, between about 3 and about 10 amino acids, between about 5 and 10 amino acids, between about 8 and 12 amino acids, between about 10 and 15 amino acids, between about 12 and 17 amino acids, between about 15 and 20 amino acids, between about 18 and 23 amino acids, between about 20 and 25 amino acids, between about 22 and about 27 amino acids, or between about 25 and 30 amino acids as compared to the TM domain of SEQ ID NO: 1 or SEQ ID NO: 2.

[0206] In embodiments, the CoV S polypeptides described herein lack the entire TM domain. In embodiments, the CoV S polypeptides comprise the TM domain.

### CoV S Polypeptide Antigens—Modifications to the CT

[0207] In embodiments, the CoV S polypeptides contain one or more modifications to the CT having an amino acid sequence of SEQ ID NO: 124, which corresponds to amino acids 1238-1273 of SEQ ID NO: 1 or amino acids 1225-1260 of SEQ ID NO: 2.

[0208] The amino acid sequence of the CT (SEQ ID NO: 124) is shown below:

TSCCSCLKGCCSCGSCCKFDEDDSEPVLKGVKLHYT

[0209] In embodiments, the CoV S polypeptides described herein comprise a CT with at least 95%, at least 96%, at least 97%, at least 98%, at least 99%, or at least 99.5%, identity to the CT of SEQ ID NO: 1 or SEQ ID NO: 2. The CT may have a deletion, an insertion, or mutation of up to about 1, up to about 2, up to about 3, up to about 4, up to about 5, up to about 10, up to about 15, up to about 20, up to about 25, or up to about 30 amino acids compared to the amino acid sequence of the CT of SEQ ID NO: 1 or SEQ ID NO: 2. The CT may have a deletion, an insertion, or mutation of between about 1 and about 5 amino acids, between about 3 and about 10 amino acids, between about 5 and 10 amino acids, between about 8 and 12 amino acids, between about 10 and 15 amino acids, between about 12 and 17 amino acids, between about 15 and 20 amino acids, between about 18 and 23 amino acids, between about 20 and 25 amino acids, between about 22 and about 27 amino acids, or between about 25 and 30 amino acids as compared to the CT of SEQ ID NO: 1 or SEQ ID NO: 2.

[0210] In embodiments, the CoV S polypeptides described herein lack a CT. In embodiments, the CoV S polypeptides comprise the CT.

[0211] In embodiments, the CoV S polypeptides comprise a TM and a CT. In embodiments, the CoV Spike (S) polypeptides contain a deletion of one or more amino acids from the transmembrane and cytoplasmic tail (TMCT) (corresponding to amino acids 1201-1260). The amino acid sequence of the TMCT is represented by SEQ ID NO: 39. In embodiments, the CoV S polypeptides which have a deletion of one or more residues of the TMCT have enhanced protein expression. In embodiments, the CoV Spike (S) polypeptides which have one or more deletions from the TMCT have an amino acid sequence selected from the group consisting of SEQ ID NO: 40, 41, 42, 52, 54, 59, 61, 88, and 89. In embodiments, the CoV S polypeptides which have one or more deletions from the TM-CD are encoded by an isolated nucleic acid sequence selected from the group consisting of SEQ ID NO: 39, 43, 53, and 60.

### CoV S Polypeptide Antigens—Non-Limiting Combinations of Mutations

[0212] In embodiments, the CoV S polypeptides contain a deletion of amino acids 56 and 57 of the native CoV Spike (S) polypeptide (SEQ ID NO: 2).

[0213] In embodiments, the CoV S polypeptides contain deletions of amino acids 131 and 132 of the native CoV Spike (S) polypeptide (SEQ ID NO: 2).

[0214] In embodiments, the CoV S polypeptides contain a deletion of amino acids 56 and 131 of the native CoV Spike (S) polypeptide (SEQ ID NO: 2). In embodiments, the CoV S polypeptides contain a deletion of amino acids 57 and 131 of the native CoV Spike (S) polypeptide (SEQ ID NO: 2).

[0215] In embodiments, the CoV S polypeptides contain a deletion of amino acids 56, 57, and 131 of the native CoV Spike (S) polypeptide (SEQ ID NO: 2).

[0216] In embodiments, the CoV S polypeptides contain a deletion of amino acids 56 and 132 of the native CoV Spike (S) polypeptide (SEQ ID NO: 2).

[0217] In embodiments, the CoV S polypeptides contain a deletion of amino acids 57 and 132 of the native CoV Spike (S) polypeptide (SEQ ID NO: 2).

[0218] In embodiments, the CoV S polypeptides contain a deletion of amino acids 56, 57, and 132 of the native CoV Spike (S) polypeptide (SEQ ID NO: 2).

[0219] In embodiments, the CoV S polypeptides contain a deletion of amino acids 56, 57, 131, and 132 of the native CoV Spike (S) polypeptide (SEQ ID NO: 2).

[0220] In embodiments, the CoV S polypeptides contain mutations that stabilize the prefusion conformation of the CoV S polypeptide. In embodiments, the CoV S polypeptides contain proline or glycine substitutions which stabilize the prefusion conformation. This strategy has been utilized for to develop a prefusion stabilized MERS-CoV S protein as described in the following documents which are each incorporated by reference herein in their entirety: Proc Natl Acad Sci USA. 2017 Aug. 29; 114(35):E7348-E7357; Sci Rep. 2018 Oct. 24; 8(1):15701; U.S. Publication No. 2020/0061185; and PCT Application No. PCT/US2017/058370.

[0221] In embodiments, the CoV S polypeptides contain a mutation at Lys-973 and Val-974 and an inactivated furin cleavage site. In embodiments, the CoV S polypeptides contain mutations of Lys-973 and Val-974 to proline and an inactivated furin cleavage site, having the amino acid sequence of QQAQ (SEQ ID NO: 7) or GSAS (SEQ ID NO: 96). An exemplary CoV S polypeptide containing a mutation at Lys-973 and Val-974 and an inactivated thrill cleavage site is depicted in FIG. 8. In embodiments, the CoV S polypeptides containing mutations of Lys-973 and Val-974 to proline and an inactivated furin cleavage site have an amino acid sequences of SEQ ID NOS: 86 or 87 and a nucleic acid sequence of SEQ ID NO: 96.

[0222] In embodiments, the CoV S polypeptides contain a mutation at Lys-973 and Val-974, an inactivated furin cleavage site, and a deletion of one or more amino acids of the fusion peptide. In embodiments, the CoV S polypeptides contain mutations of Lys-973 and Val-974 to proline, an inactivated furin cleavage site having the amino acid sequence of QQAQ (SEQ ID NO: 7) or GSAS (SEQ ID NO: 96), and deletion of one or more amino acids of the fusion peptide. In embodiments, the CoV S polypeptides containing mutations of Lys-973 and Val-974 to proline, an inactivated furin cleavage site, and deletion of one or more amino acids of the fusion peptide having an amino acid sequence of SEQ ID NO: 105 or 106. In embodiments, the CoV S polypeptide contains a mutation of Leu-5 to phenylalanine, mutation of Thr-7 to asparagine, mutation of Pro-13 to serine, mutation of Asp-125 to tyrosine, mutation of Arg-177 to serine, mutation of Lys-404 to threonine, mutation of Glu-471 to lysine, mutation of Asn-488 to tyrosine, mutation of His-642 to tyrosine, mutation of Thr-1014 to isoleucine, mutations of Lys-973 and Val-974 to proline, and an inactivated furin cleavage site having the amino acid sequence of QQAQ (SEQ ID NO: 7) or GSAS (SEQ ID NO: 96) relative to the native CoV Spike (S) polypeptide (SEQ ID NO: 2).

[0223] In embodiments, the CoV S polypeptide contains a mutation of Trp-139 to cysteine, mutation of Leu-439 to arginine, mutations of Lys-973 and Val-974 to proline, and an inactivated furin cleavage site having the amino acid sequence of QQAQ (SEQ ID NO: 7) or GSAS (SEQ ID NO: 96) relative to the native CoV Spike (S) polypeptide (SEQ ID NO: 2). In embodiments, the CoV S polypeptide contains a mutation of Trp-152 to cysteine, mutation of Leu-452 to arginine, mutation of Ser-13 to isoleucine, mutations of Lys-986 and Val-987 to proline, and an inactivated furin cleavage site having the amino acid sequence of QQAQ (SEQ ID NO: 7) or GSAS (SEQ ID NO: 96) relative to the native CoV Spike (S) polypeptide (SEQ ID NO: 1).

[0224] In embodiments, the CoV S polypeptide contains a mutation of Lys-404 to threonine or asparagine, mutation of Glu-471 to lysine, mutation of Asn-488 to tyrosine, mutation of Leu-5 to phenylalanine, mutation of Asp-67 to alanine, mutation of Asp-202 to glycine, deletion of one or more of amino acids 229-231, mutation of Arg-233 to isoleucine, mutations of Lys-973 and Val-974 to proline, and an inactivated furin cleavage site having the amino acid sequence of QQAQ (SEQ ID NO: 7) or GSAS (SEQ ID NO: 96) relative to the native CoV Spike (S) polypeptide (SEQ ID NO: 2).

[0225] In embodiments, the CoV S polypeptide contains a mutation of Asn-488 to tyrosine, mutations of Lys-973 and Val-974 to proline, and an inactivated furin cleavage site having the amino acid sequence of QQAQ (SEQ ID NO: 7) or GSAS (SEQ ID NO: 96) relative to the native CoV Spike (S) polypeptide (SEQ ID NO: 2). In embodiments, the CoV S polypeptide having a mutation of Asn-488 to tyrosine, mutations of Lys-973 and Val-974 to proline, and an inactivated furin cleavage site having the amino acid sequence of QQAQ (SEQ ID NO: 7) or DSAS (SEQ ID NO: 96) comprises an amino acid sequence of SEQ ID NO: 112.

[0226] In embodiments, the CoV S polypeptide contains a mutation of Asp-601 to glycine, a mutation of Asn-488 to tyrosine, mutations of Lys-973 and Val-974 to proline, and an inactivated furin cleavage site having the amino acid sequence of QQAQ (SEQ ID NO: 7) or GSAS (SEQ ID NO: 96) relative to the native CoV Spike (S) polypeptide (SEQ ID NO: 2). In embodiments, the CoV S polypeptide having a mutation of Asn-488 to tyrosine, mutations of Lys-973 and Val-974 to proline, and an inactivated furin cleavage site having the amino acid sequence of QQAQ (SEQ ID NO: 7) or GSAS (SEQ ID NO: 96) comprises an amino acid sequence of SEQ ID NO: 113.

[0227] In embodiments, the CoV S polypeptide contains deletion of amino acids 56, 57, and 131, mutation of Asn-488 to tyrosine, a mutation of Ala-557 to aspartate, mutation of Asp-601 to glycine, mutation of Pro-668 to histidine, mutation of Thr-703 to isoleucine, mutation of Ser-969 to alanine, mutation of Asp-1105 to histidine, mutations of Lys-973 and Val-974 to proline, and an inactivated furin cleavage site having the amino acid sequence of QQAQ (SEQ ID NO: 7), GSAS (SEQ ID NO: 96), or GG relative to the native CoV Spike (S) polypeptide (SEQ ID NO: 2). In embodiments, the CoV S polypeptide having deletion of amino acids 56, 57, and 131, mutation of Asn-488 to tyrosine, a mutation of Ala-557 to aspartate, mutation of Asp-601 to glycine, mutation of Pro-668 to histidine, mutation of Thr-703 to isoleucine, mutation of Ser-969 to alanine, mutation of Asp-1105 to histidine, mutations of Lys-973 and Val-974 to proline, and an inactivated furin cleavage site having the amino acid sequence of QQAQ (SEQ ID NO: 7) or GSAS (SEQ ID NO: 96) comprises an amino acid sequence of SEQ ID NO: 114. In embodiments, the CoV S polypeptide having deletion of amino acids 56, 57, and 131, mutation of Asn-488 to tyrosine, a mutation of Ala-557 to aspartate, mutation of Asp-601 to glycine, mutation of Pro-668 to histidine, mutation of Thr-703 to isoleucine, mutation of Ser-969 to alanine, mutation of Asp-1105 to histidine, mutations of Lys-973 and Val-974 to proline, and an inactivated furin cleavage site having the amino acid sequence of QQAQ (SEQ ID NO: 7) or DSAS (SEQ ID NO: 96) or GG comprises an amino acid sequence of SEQ ID NO: 136. In embodiments, the CoV S polypeptide having deletion of amino acids 56, 57, and 131, mutation of Asn-488 to tyrosine, a mutation of Ala-557 to aspartate, mutation of Asp-601 to glycine, mutation of Pro-668 to histidine, mutation of Thr-703 to isoleucine, mutation of Ser-969 to alanine, mutation of Asp-1105 to histidine, mutations of Lys-973 and Val-974 to proline, and an inactivated furin cleavage site having the amino acid sequence of GG comprises an amino acid sequence of SEQ ID NO: 137 or SEQ ID NO: 138. In some embodiments, the CoV S polypeptide having an amino acid sequence of SEQ ID NO: 114 or SEQ ID NO: 136 is encoded by a nucleic acid having a nucleic acid sequence of SEQ ID NO: 135. In some embodiments, the CoV S polypeptide having an amino acid sequence of SEQ ID NO: 137 or SEQ ID NO: 138 is encoded by a nucleic acid having a sequence of SEQ ID NO: 139.

[0228] In embodiments, the CoV S polypeptide contains deletion of amino acids 56, 57, and 132, mutation of Asn-488 to tyrosine, a mutation of Ala-557 to aspartate, mutation of Asp-601 to glycine, mutation of Pro-668 to histidine, mutation of Thr-703 to isoleucine, mutation of Ser-969 to alanine, mutation of Asp-1105 to histidine, mutations of Lys-973 and Val-974 to proline, and an inactivated furin cleavage site having the amino acid sequence of QQAQ (SEQ ID NO: 7) or GSAS (SEQ ID NO: 96 relative to the native CoV Spike (S) polypeptide (SEQ ID NO: 2). In embodiments, the CoV S polypeptide having a deletion of amino acids 56, 57, and 132, mutation of Asn-488 to tyrosine, a mutation of Ala-557 to aspartate, mutation of Asp-601 to glycine, mutation of Pro-668 to histidine, mutation of Thr-703 to isoleucine, mutation of Ser-969 to alanine, mutation of Asp-1105 to histidine, mutations of Lys-973 and Val-974 to proline, and an inactivated furin cleavage site having the amino acid sequence of QQAQ (SEQ ID NO: 7) or GSAS (SEQ ID NO: 96) comprises an amino acid sequence of SEQ ID NO: 114.

[0229] In embodiments, the CoV S polypeptide contains mutation of Asn-488 to tyrosine, mutation of Asp-67 to alanine, mutation of Leu-229 to histidine, mutation of Asp-202 to glycine, mutation of Lys-404 to asparagine, mutation of Glu-471 to lysine, mutation of Ala-688 to valine, mutation of Asp-601 to glycine, mutations of Lys-973 and Val-974 to proline, and an inactivated furin cleavage site having the amino acid sequence of QQAQ (SEQ ID NO: 7) or GSAS (SEQ ID NO: 96) relative to the native CoV Spike (S) polypeptide (SEQ ID NO: 2). In embodiments, the CoV S polypeptide having a mutation of Asn-488 to tyrosine, mutation of Asp-67 to alanine, mutation of Leu-229 to histidine, mutation of Asp-202 to glycine, mutation of Lys-404 to asparagine, mutation of Glu-471 to lysine, mutation of Ala-688 to valine, mutation of Asp-601 to glycine, mutations of Lys-973 and Val-974 to proline, and an inactivated furin cleavage site having the amino acid sequence of QQAQ (SEQ ID NO: 7) or GSAS (SEQ ID NO: 96) comprises an amino acid sequence of SEQ ID NO: 115.

[0230] In embodiments, the CoV S polypeptide contains one or more modifications selected from: K973P, V974P, an inactivated furin cleavage site, deletions of amino acid 56, deletion of amino acid 57, deletion of amino acid 131, N488Y, A557D, D601G, P668H, T703I, S969A, and D1105H, wherein the amino acids are numbered with respect to a CoV S polypeptide having an amino acid sequence of SEQ ID NO: 2. In embodiments, the inactivated furin cleavage site has the amino acid sequence of QQAQ (SEQ ID NO: 7). In embodiments, the inactivated furin cleavage site has the amino acid sequence of GG.

[0231] In embodiments, the CoV S polypeptide contains one or more modifications selected from: K973P, V974P, an inactivated furin cleavage site, D67A, D202G, L229H, K404N, E471K, N488Y, D601G, and A688V, wherein the amino acids are numbered with respect to a CoV S polypeptide having an amino acid sequence of SEQ ID NO: 2. In embodiments, the inactivated furin cleavage site has the amino acid sequence of QQAQ (SEQ ID NO: 7). In embodiments, the inactivated furin cleavage site has the amino acid sequence of GG.

[0232] In embodiments, the CoV S polypeptide contains one or more modifications selected from: K973P, V974P, an inactivated furin cleavage site, deletion of amino acids 229-231, D67A, D202G, K404N, E471K, N488Y, D601G, and A688V, wherein the amino acids are numbered with respect to a CoV S polypeptide having an amino acid sequence of SEQ ID NO: 2.

[0233] In embodiments, the CoV S polypeptide contains one or more modifications selected from: K973P, V974P, an inactivated furin cleavage site having the amino acid sequence of QQAQ (SEQ ID NO: 7), deletion of amino acids 229-231, L5F, D67A, D202G, K404N, E471K, N488Y, D601G, and A688V, wherein the amino acids are numbered with respect to a CoV S polypeptide having an amino acid sequence of SEQ ID NO: 2. In embodiments, the CoV S polypeptide having one or more modifications selected from K973P, V974P, an inactivated furin cleavage site having the amino acid sequence of QQAQ (SEQ II) NO: 7), deletion of amino acids 229-231, L5F, D67A, D202G, K404N, E471K, N488Y, D601G, and A688V, wherein the amino acids are numbered with respect to a CoV S polypeptide having an amino acid sequence of SEQ ID NO: 2 comprises the amino acid sequence of SEQ ID NO: 144. In embodiments, the CoV S polypeptide having the amino acid sequence of SEQ ID NO: 144 is encoded by a nucleic acid having a sequence of SEQ ID NO: 145.

[0234] In embodiments, the CoV S polypeptide contains one or more modifications selected from: K973P, V974P, an inactivated furin cleavage site having the amino acid sequence of GG, deletion of amino acids 229-231, L5F, D67A, D202G, K404N, E471K, N488Y, D601G, and A688V, wherein the amino acids are numbered with respect to a CoV S polypeptide having an amino acid sequence of SEQ ID NO: 2. In embodiments, the CoV S polypeptide having one or more modifications selected from K973P, V974P, an inactivated furin cleavage site having the amino acid sequence of GG, deletion of amino acids 229-231, L5F, D67A, D202G, K404N, E471K, N488Y, D601G, and A688V, wherein the amino acids are numbered with respect to a CoV S polypeptide having an amino acid sequence of SEQ ID NO: 2 comprises the amino acid sequence of SEQ ID NO: 144. In embodiments, the CoV S polypeptide having the amino acid sequence of SEQ ID NO: 144 is encoded by a nucleic acid having a sequence of SEQ ID NO: 145.

[0235] In embodiments, the CoV S polypeptide contains one or more modifications selected from: K973P, V974P, an inactivated furin cleavage site, L5F, T7N, P13S, D125Y, R177S, K404T, E471K, N488Y, D601G, H642Y, T1014I, and V1163F, wherein the amino acids are numbered with respect to a CoV S polypeptide having an amino acid sequence of SEQ ID NO: 2. In embodiments, the CoV S polypeptide containing one or more modifications selected from: K973P, V974P, an inactivated furin cleavage site, L5F, T7N, P13S, D125Y, R177S, K404T, E471K, N488Y, D601G, H642Y, T1014I, and V1163F, wherein the amino acids are numbered with respect to a CoV S polypeptide having an amino acid sequence of SEQ ID NO: 2, has an amino acid sequence of SEQ ID NO: 151. In embodiments, the CoV S polypeptide having an amino acid sequence of SEQ ID NO: 151 is encoded by a nucleic acid having a sequence of SEQ ID NO: 150.

[0236] In embodiments, the CoV S polypeptide contains one or more modifications selected from: K973P, V974P, an inactivated furin cleavage site, deletion of amino acids 229-231, L5F, D67A, D202G, L229H, K404N, E471K, N488Y, D601G, and A688V, wherein the amino acids are numbered with respect to a CoV S polypeptide having an amino acid sequence of SEQ ID NO: 2.

[0237] In embodiments, the CoV S polypeptide contains one or more modifications selected from: K973P, V974P, an inactivated furin cleavage site, K404N, E471K, N488Y, L5F, D67A, D202G, L229H, D601G, A688V, and deletion of amino acids 229-231, wherein the amino acids are numbered with respect to a CoV S polypeptide having an amino acid sequence of SEQ ID NO: 2. In embodiments, the inactivated furin cleavage site has the amino acid sequence of QQAQ (SEQ ID NO: 7). In embodiments, the inactivated furin cleavage site has the amino acid sequence of GG

[0238] In embodiments, the CoV S polypeptide contains one or more modifications selected from: K973P, V974P, an inactivated furin cleavage site. K404N, E471K, and N488K wherein the amino acids are numbered with respect to a CoV S polypeptide having an amino acid sequence of SEQ ID NO: 2. In embodiments, the CoV S polypeptide contains one or more modifications selected from: K973P, V974P, an inactivated furin cleavage site, K404N, E471K, and N488Y. In embodiments, the CoV S polypeptide is the RBD of the CoV S polypeptide having one or more modifications selected from K973P, V974P, an inactivated furin cleavage site, K404N, E471K, and N488K wherein the amino acids are numbered with respect to a CoV S polypeptide having an amino acid sequence of SEQ ID NO: 2. In embodiments, the CoV S polypeptide is the RBD of the CoV S polypeptide having one or more modifications selected from K973P, V974P, an inactivated furin cleavage site, K404N, E471K, and N488Y wherein the amino acids are numbered with respect to a CoV S polypeptide having an amino acid sequence of SEQ ID NO: 2.

[0239] In embodiments, the CoV S polypeptide contains one or more modifications selected from: K973P, V974P, an inactivated furin cleavage site having the amino acid sequence of GG, D601G, E404N, E471K, and N488Y. In embodiments, the CoV S polypeptide contains one or more modifications selected from: K973P, V974P, an inactivated furin cleavage site having the amino acid sequence of GG, and a D601G mutation, wherein the amino acids are numbered with respect to a CoV S polypeptide having an amino acid sequence of SEQ ID NO: 2. In embodiments, the CoV S polypeptide containing modifications selected from: K973P, V974P, an inactivated furin cleavage site having the amino acid sequence of GG, and a D601G mutation has an amino acid sequence of SEQ ID NO: 133.

[0240] In embodiments, the CoV S polypeptide contains one or more modifications selected from: K973P, V974P, an inactivated furin cleavage site, optionally wherein the inactivated furin cleavage site is QQAQ (SEQ ID NO: 7) or GG, K404N, E471K, N488K, D67A, D202G, L229H, D601G, and A688V, wherein the amino acids are numbered with respect to a CoV S polypeptide having an amino acid sequence of SEQ ID NO: 2. In embodiments, the CoV S polypeptide containing one or more modifications selected from: K973P, V974P, an inactivated furin cleavage site, optionally wherein the inactivated furin cleavage site is QQAQ (SEQ ID NO: 7) or GG, K404N, E471K, N488K, D67A, D202G, L229H, D601G, and A688V has an amino acid sequence of SEQ ID NO: 132 or SEQ ID NO: 141. In embodiments, the CoV S polypeptide having an amino acid sequence of SEQ ID NO: 132 is encoded by a nucleic acid having a nucleic acid sequence of SEQ ID NO: 131. In embodiments, the CoV S polypeptide having an amino acid sequence of SEQ ID NO: 132 is encoded by a nucleic acid having a nucleic acid sequence of SEQ ID NO: 142.

[0241] In embodiments, the CoV S polypeptide contains one or more modifications selected from: K973P, V974P, an inactivated furin cleavage site, W139C and L439R, wherein the amino acids are numbered with respect to a CoV S polypeptide having an amino acid sequence of SEQ ID NO: 2. In embodiments, the CoV S polypeptide comprising K973P, V974P, an inactivated furin cleavage site, W139C and L439R modifications is expressed with a signal peptide having an amino acid sequence of SEQ ID NO: 117 or SEQ ID NO: 5. In embodiments, the CoV S polypeptide comprises one or more modifications selected from: K973P, V974P, an inactivated furin cleavage site, D601G, W139C, and L439R, wherein the amino acids are numbered with respect to a CoV S polypeptide having an amino acid sequence of SEQ ID NO: 2. In embodiments, the CoV S polypeptide comprises K973P, V974P, an inactivated furin cleavage site, D601G, W139C, and L439R modifications and is expressed with a signal peptide having an amino acid sequence of SEQ ID NO: 117 or SEQ ID NO: 5.

[0242] In embodiments, the CoV S polypeptide comprises one or more modifications selected from: K973P, V974P, an inactivated furin cleavage site, D601G, L5F, D67A, D202G, deletions of amino acids 229-231, R233I, K404N, E471K, N488Y, and A688V, wherein the amino acids are numbered with respect to a CoV S polypeptide having an amino acid sequence of SEQ ID NO: 2.

[0243] In embodiments, the CoV S polypeptide contains one or more modifications selected from: K973P, V974P, an inactivated furin cleavage site, optionally wherein the inactivated furin cleavage site is QQAQ (SEQ ID NO: 7), W139C, S481P, D601G, and L439R, wherein the amino acids are numbered with respect to a CoV S polypeptide having an ammo acid sequence of SEQ ID NO: 2. In embodiments, the CoV S polypeptide contains one or more modifications selected from: K973P, V974P, an inactivated furin cleavage site, optionally wherein the inactivated furin cleavage site is QQAQ (SEQ ID NO: 7), W139C, D601G, and L439R, wherein the amino acids are numbered with respect to a CoV S polypeptide having an amino acid sequence of SEQ ID NO: 2. In embodiments, the CoV S polypeptide contains one or more modifications selected from: K973P, V974P, an inactivated furin cleavage site, optionally wherein the inactivated furin cleavage site is QQAQ (SEQ ID NO: 7), W139C, S481P, and D601G wherein the amino acids are numbered with respect to a CoV S polypeptide having an amino acid sequence of SEQ ID NO: 2. In embodiments, the CoV S polypeptide containing one or more modifications selected from: K973P, V974P, an inactivated furin cleavage site, optionally wherein the inactivated furin cleavage site is QQAQ (SEQ ID NO: 7), W139C, S481P, D601G, and L439R has the amino acid sequence of SEQ ID NO: 153. In embodiments, the CoV S polypeptide having the amino acid sequence of SEQ ID NO: 153 comprises a signal peptide having an amino acid sequence of SEQ ID NO: 117. In embodiments, the CoV S polypeptide having the amino acid sequence of SEQ ID NO: 153 comprises a signal peptide having an amino acid sequence of SEQ ID NO: 5.

[0244] In embodiments, the CoV S polypeptide contains one or more modifications selected from: K973P, V974P, an inactivated furin cleavage site, optionally wherein the inactivated furin cleavage site is QQAQ (SEQ ID NO: 7), T82I, D240G, E471K, D601G, and A688V, wherein the amino acids are numbered with respect to a CoV S polypeptide having an amino acid sequence of SEQ ID NO: 2. In embodiments, the CoV S polypeptide containing one or more modifications selected from: K973P, V974P, an inactivated furin cleavage site, optionally wherein the inactivated furin cleavage site is QQAQ (SEQ ID NO: 7), T82I, D240G, E471K, D601G, and A688V, wherein the amino acids are numbered with respect to a CoV S polypeptide having an amino acid sequence of SEQ ID NO: 2, has an amino acid sequence of SEQ ID NO: 156. In embodiments, the CoV S polypeptide containing one or more modifications selected from: K973P, V974P, an inactivated furin cleavage site, optionally wherein the inactivated furin cleavage site is QQAQ (SEQ ID NO: 7), T82I, D240G, E471K, D601G, and A688V, wherein the amino acids are numbered with respect to a CoV S polypeptide having an amino acid sequence of SEQ ID NO: 2, comprises a signal peptide having an amino acid sequence of SEQ ID NO: 154 or SEQ ID NO: 5.

[0245] In embodiments, the CoV S polypeptide contains one or more modifications selected from: K973P, V974P, an inactivated furin cleavage site, optionally wherein the inactivated furin cleavage site is QQAQ (SEQ ID NO: 7), T82I, D240G, S464N, D601G, and A688V, wherein the amino acids are numbered with respect to a CoV S polypeptide having an amino acid sequence of SEQ ID NO: 2. In embodiments, the CoV S polypeptide containing one or more modifications selected from: K973P, V974P, an inactivated furin cleavage site, optionally wherein the inactivated furin cleavage site is QQAQ (SEQ ID NO: 7), T82I, D240G, S464N, D601G, and A688V, wherein the amino acids are numbered with respect to a CoV S polypeptide having an amino acid sequence of SEQ ID NO: 2, has an amino acid sequence of SEQ ID NO: 158. In embodiments, the CoV S polypeptide containing one or more modifications selected from: K973P, V974P, an inactivated furin cleavage site, optionally wherein the inactivated furin cleavage site is QQAQ (SEQ ID NO: 7), T82I, D240G, S464N, D601G, and A688V, wherein the amino acids are numbered with respect to a CoV S polypeptide having an amino acid sequence of SEQ ID NO: 2, comprises a signal peptide of SEQ ID NO: 154.

[0246] In embodiments, the CoV S polypeptide contains one or more modifications selected from: K973P, V974P, an inactivated furin cleavage site, optionally wherein the inactivated furin cleavage site is QQAQ (SEQ ID NO: 7), deletion of amino acid 56, deletion of amino acid 57, deletion of amino acid 131, a N488Y mutation, an A557D mutation, a D601G mutation, a P668H mutation, a T703I mutation, a S969A mutation, and a D1105H mutation, wherein the CoV polypeptide is numbered with respect to the wild-type SARS-CoV-2 S polypeptide having the amino acid sequence of SEQ ID NO: 2. In embodiments, the CoV S polypeptide contains one or more modifications selected from: K973P, V974P, an inactivated furin cleavage site, optionally wherein the inactivated furin cleavage site is QQAQ (SEQ ID NO: 7), deletion of amino acid 56, deletion of amino acid 57, deletion of amino acid 132, a N488Y mutation, an A557D mutation, a D601G mutation, a P668H mutation, a T703I mutation, a S969A mutation, and a D1105H mutation, wherein the CoV S polypeptide is numbered with respect to the wild-type SARS-CoV-2 S polypeptide having the amino acid sequence of SEQ ID NO: 2.

[0247] In embodiments, the CoV S polypeptide contains one or more modifications selected from: K973P, V974P, an inactivated furin cleavage site, optionally wherein the inactivated furin cleavage site is QQAQ (SEQ ID NO: 7), a D67A mutation, a L229H mutation, a R233I mutation, an A688V mutation, an N488Y mutation, a K404N mutation, a E471K mutation, and a D601G mutation, wherein the CoV S polypeptide is numbered with respect to the wild-type SARS-CoV-2 S polypeptide having the amino acid sequence of SEQ ID NO: 2.

[0248] In embodiments, the CoV S polypeptide contains one or more modifications selected from: K973P, V974P, an inactivated furin cleavage site, optionally wherein the inactivated furin cleavage site is QQAQ (SEQ ID NO: 7), a L5F mutation, a T7N mutation, a P13S mutation, a D125Y mutation, a R177S mutation, a K404T mutation, a E471K mutation, a N488Y mutation, a D601G mutation, a H642Y mutation, a T1014I mutation, and a T1163F mutation, wherein the CoV S polypeptide is numbered with respect to the wild-type SARS-CoV-2 S polypeptide having the amino acid sequence of SEQ ID NO: 2.

[0249] In embodiments, the CoV S polypeptide contains one or more modifications selected from: K986P, V987P, an inactivated furin cleavage site, optionally wherein the inactivated furin cleavage site is QQAQ (SEQ II) NO: 7), a S13I mutation, a W152C mutation, and a L452R mutation, wherein the CoV S polypeptide is numbered with respect to the wild-type SARS-CoV-2 S polypeptide having the amino acid sequence of SEQ ID NO: 1. In embodiments, the CoV S polypeptide contains one or more modifications selected from: K986P, V987P, an inactivated furin cleavage site, optionally wherein the inactivated furin cleavage site is QQAQ (SEQ ID NO: 7), a S13I mutation, a W152C mutation, and a L452R mutation, wherein the CoV S polypeptide is numbered with respect to the wild-type SARS-CoV-2 S polypeptide having the amino acid sequence of SEQ ID NO: 1 lacks an N-terminal signal peptide.

[0250] In embodiments, the CoV Spike (S) polypeptides comprise a polypeptide linker. In embodiments, the polypeptide linker contains glycine and serine. In embodiments, the linker has about 50%, about 55%, about 60%, about 65%, about 70%, about 75%, about 80%, about 85%, about 90%, about 95%, or about 100% glycine.

[0251] In embodiments, the polypeptide linker has a repeat of (SGGG)ₙ (SEQ ID NO: 91), wherein n is an integer from 1 to 50 (e.g. 1, 2, 3, 4, 5, 6, 7, 8, 9, 10, 11, 12, 13, 14, 15, 16, 17, 18, 19, 20, 21, 22, 23, 24, 25, 26, 27, 28, 29, 30, 31, 32, 33, 34, 35, 36, 37, 38, 39, 40, 41, 42, 43, 44, 45, 46, 47, 48, 49, or 50). In embodiments, the polypeptide linker has an amino acid sequence corresponding to SEQ ID NO: 90.

[0252] In embodiments, the polypeptide linker has a repeat of (GGGGS)ₙ (SEQ ID NO: 93), wherein n is an integer from 1 to 50 (e.g. 1, 2, 3, 4, 5, 6, 7, 8, 9, 10, 11, 12, 13, 14, 15, 16, 17, 18, 19, 20, 21, 22, 23, 24, 25, 26, 27, 28, 29, 30, 31, 32, 33, 34, 35, 36, 37, 38, 39, 40, 41, 42, 43, 44, 45, 46, 47, 48, 49, or 50).

[0253] In embodiments, the polypeptide linker has a repeat of (GGGS)ₙ (SEQ ID NO: 92), wherein n is an integer from 1 to 50 (e.g. 1, 2, 3, 4, 5, 6, 7, 8, 9, 10, 11, 12, 13, 14, 15, 16, 17, 18, 19, 20, 21, 22, 23, 24, 25, 26, 27, 28, 29, 30, 31, 32, 33, 34, 35, 36, 37, 38, 39, 40, 41, 42, 43, 44, 45, 46, 47, 48, 49, or 50).

[0254] In aspects, the polypeptide linker is a poly-(Gly)n linker, wherein n is 1, 2, 3, 4, 5, 6, 7, 8, 9, 10, 15, 16, 17, 18, 19, or 20. In other embodiments, the linker is selected from the group consisting of: dipeptides, tripeptides, and quadripeptides. In embodiments, the linker is a dipeptide selected from the group consisting of alanine-serine (AS), leucine-glutamic acid (LE), and serine-arginine (SR).

[0255] In embodiments, the polypeptide linker comprises between 1 to 100 contiguous amino acids of a naturally occurring CoV S polypeptide or of a CoV S polypeptide disclosed herein. In embodiments, the polypeptide linker has an amino acid sequence corresponding to SEQ ID NO: 94.

[0256] In embodiments, the CoV Spike (S) polypeptides comprise a foldon. In embodiments, the TMCT is replaced with a foldon. In embodiments, a foldon causes trimerization of the CoV Spike (S) polypeptide. In embodiments, the foldon is an amino acid sequence known in the art. In embodiments, the foldon has an amino acid sequence of SEQ ID NO: 68. In embodiments, the foldon is a T4 fibritin trimerization motif. In embodiments, the T4 fibritin trimerization domain has an amino acid sequence of SEQ ID NO: 103. In embodiments, the foldon is separated in amino acid sequence from the CoV Spike (S) polypeptide by a polypeptide linker. Non-limiting examples of polypeptide linkers are found throughout this disclosure.

[0257] In embodiments, the disclosure provides CoV S polypeptides comprising a fragment of a coronavirus S protein and nanoparticles and vaccines comprising the same. In embodiments, the fragment of the coronavirus S protein is between 10 and 1500 amino acids in length (e.g. about 10, about 20, about 30, about 40, about 50, about 60, about 70, about 80, about 90, about 100, about 150, about 200, about 250, about 300, about 350, about 400, about 450, about 500, about 550, about 600, about 650, about 700, about 750, about 800, about 850, about 900, about 950, about 1000, about 1050, about 1100, about 1150, about 1200, about 1250, about 1300, about 1350, about 1400, about 1450, or about 1500 amino acids in length). In embodiments, the fragment of the coronavirus S protein is selected from the group consisting of the receptor binding domain (RBD), subdomain 1, subdomain 2, upper helix, fusion peptide, connecting region, heptad repeat 1, central helix, heptad repeat 2, NTD, and TMCT.

[0258] In embodiments, the CoV S polypeptide comprises an RBD and a subdomain 1. In embodiments, the CoV S polypeptide comprising an RBD and a subdomain 1 is amino acids 319 to 591 of SEQ ID NO: 1.

[0259] In embodiments, the CoV S polypeptide contains a fragment of a coronavirus S protein, wherein the fragment of the coronavirus S protein is the RBD. Non-limiting examples of RBDs include the RBD of SARS-CoV-2 (amino acid sequence=SEQ ID NO: 69), the RBD of SARS (amino acid sequence=SEQ ID NO: 70), and the RBD of MERS, (amino acid sequence=SEQ ID NO: 71).

[0260] In embodiments, the CoV S polypeptide contains two or more RBDs, which are connected by a polypeptide linker. In embodiments, the polypeptide linker has an amino acid sequence of SEQ ID NO: 90 or SEQ ID NO: 94.

[0261] In embodiments, the CoV S polypeptide contains 1, 2, 3, 4, 5, 6, 7, 8, 9, 10, 11, 14, 15, 16, 17, 18, 19, or 20 RBDs.

[0262] In some embodiments, the CoV S polypeptide contains two or more SARS-CoV-2 RBDs, which are connected by a polypeptide linker. In embodiments, the antigen containing two or more SARS-CoV-2 RBDs has an amino acid sequence corresponding to one of SEQ ID NOS: 72-75.

[0263] In embodiments, the CoV S polypeptide contains a SARS-CoV-2 RBD and a SARS RBD. In embodiments, the CoV S polypeptide comprises a SARS-CoV-2 RBD and a SARS RBD, wherein each RBD is separated by a polypeptide linker. In embodiments, the CoV S polypeptide comprising a SARS-CoV-2 RBD and a SARS RBD has an amino acid sequence selected from the group consisting of SEQ ID NOS: 76-79.

[0264] In embodiments, the CoV S polypeptide contains a SARS-CoV-2 RBD and a MERS RBD. In embodiments, the CoV S polypeptide comprises a SARS-CoV-2 RBD and a MERS RBD, wherein each RBD is separated by a polypeptide linker.

[0265] In embodiments, the CoV S polypeptide comprises a SARS RBD and a MERS RBD. In embodiments, the CoV S polypeptide comprises a SARS RBD and a MERS RBD, wherein each RBD is separated by a polypeptide linker.

[0266] In embodiments, the CoV S polypeptide contains a SARS-CoV-2 RBD, a SARS RBD, and a MERS RBD. In embodiments, the CoV S polypeptide contains a SARS-CoV-2 RBD, a SARS RBD, and a MERS RBD, wherein each RBD is separated by a polypeptide linker. In embodiments, the CoV S polypeptide comprising a SARS-CoV-2 RBD, a SARS RBD, and a MERS RBD has an amino acid sequence selected from the group consisting of SEQ ID NOS: 80-83.

[0267] In embodiments, the CoV S polypeptides described herein are expressed with an N-terminal signal peptide. In embodiments, the N-terminal signal peptide has an amino acid sequence of SEQ ID NO: 5 (MFVFLVLLPLVSS). In embodiments, the N-terminal signal peptide has an amino acid sequence of SEQ ID NO: 117 (MFVFLVLLPLVSI). In embodiments, the N-terminal signal peptide has an amino acid sequence of SEQ ID NO: 154 (MFVFFVLLPLVSS). In embodiments, the signal peptide may be replaced with any signal peptide that enables expression of the CoV S protein. In embodiments, one or more of the CoV S protein signal peptide amino acids may be deleted or mutated. An initiating methionine residue is maintained to initiate expression. In embodiments, the CoV S polypeptides are encoded by a nucleic acid sequence selected from the group consisting of SEQ ID NO: 35, SEQ ID NO: 37, SEQ ID NO: 95, SEQ ID NO: 43, SEQ ID NO: 47, SEQ ID NO: 50, SEQ ID NO: 53, SEQ ID NO: 55, SEQ ID NO: 57, SEQ ID NO: 96, SEQ ID NO: 60, SEQ ID NO: 131, SEQ ID NO: 135, SEQ ID NO: 142, SEQ ID NO: 145, SEQ ID NO: 148, and SEQ ID NO: 150. In embodiments, the N-terminal signal peptide of the CoV S polypeptide contains a mutation at Ser-13 relative to the native CoV Spike (S) signal polypeptide (SEQ ID NO: 5). In embodiments, Ser-13 is mutated to any natural amino acid. In embodiments, Ser-13 is mutated to alanine, methionine, isoleucine, leucine, threonine, or valine. In embodiments, Ser-13 is mutated to isoleucine.

[0268] Following expression of the CoV S protein in a host cell, the N-terminal signal peptide is cleaved to provide the mature CoV protein sequence (SEQ ID NOS: 2, 4, 38, 41, 44, 48, 51, 54, 58, 61, 63, 65, 67, 73, 75, 78, 79, 82, 83, 85, 87, 89, 106, 110. 132, 133, 114, 138, 141, 144, 147, 151, 153, 156, and 158, 164-168). In embodiments, the signal peptide is cleaved by host cell proteases. In aspects, the full-length protein may be isolated from the host cell and the signal peptide cleaved subsequently.

[0269] Following cleavage of the signal peptide from the CoV Spike (S) polypeptide with an amino acid sequence corresponding to SEQ ID NOS: 1, :3, 36, 40, 42, 46, 49, 52, 56, 59, 62, 64, 66, 72, 74, 76, 77, 80, 81, 84, 86, 7 105, 107, 88, 109, 130, 134, 136, 137, 140, 143, 146, 149, 152, 155, 157, 159-163 during expression and purification, a mature polypeptide having an amino acid sequence selected from the group consisting of SEQ ID NOS: 2, 4, 38, 41, 44, 48, 51, 54, 58, 61, 63, 65, 67, 73, 75, 78, 79, 82, 83, 85, 106, 108, 89, and 110, 112-115, 132, 133, 114, 138, 141, 144 147, 151, 153, 156, and 158, 164-168 is obtained and used to produce a CoV S nanoparticle vaccine or CoV S nanoparticles.

[0270] Advantageously, the disclosed CoV S polypeptides may have enhanced protein expression and stability relative to the native CoV Spike (S) protein.

[0271] In embodiments, the CoV S polypeptides described herein contain further modifications from the native coronavirus S protein (SEQ ID NO: 2). In embodiments, the coronavirus S proteins described herein exhibit at least 80%, or at least 90%, or at least 95%, or at least 97%, or at least 99% identity to the native coronavirus S protein. A person of skill in the art would use known techniques to calculate the percent identity of the recombinant coronavirus S protein to the native protein or to any of the CoV S polypeptides described herein. For example, percentage identity can be calculated using the tools CLUSTALW2 or Basic Local Alignment Search Tool (BLAST), which are available online. The following default parameters may be used for CLUSTALW2 Pairwise alignment: Protein Weight Matrix=Gonnet; Gap Open=10; Gap Extension=0.1.

[0272] In embodiments, the CoV S polypeptides described herein are at least 95%, at least 96%, at least 97%, at least 98%, at least 99%, or at least 99.5% identical to the CoV S polypeptide having an amino acid sequence of SEQ ID NO: 87. A CoV S polypeptide may have a deletion, an insertion, or mutation of up to about 1, up to about 2, up to about 3, up to about 4, up to about 5, up to about 10, up to about 15, up to about 20, up to about 25, up to about 30, up to about 35, up to about 40, up to about 45, or up to about 50 amino acids compared to the amino acid sequence of the CoV S polypeptide having an amino acid sequence of SEQ ID NO: 87. A CoV S polypeptide may have may have a deletion, an insertion, or mutation of between about 1 and about 5 amino acids, between about 3 and about 10 amino acids, between about 5 and 10 amino acids, between about 8 and 12 amino acids, between about 10 and 15 amino acids, between about 12 and 17 amino acids, between about 15 and 20 amino acids, between about 18 and 23 amino acids, between about 20 and 25 amino acids, between about 22 and about 27 amino acids, between about 25 and 30 amino acids, between about 30 and 35 amino acids, between about 35 and 40 amino acids, between about 40 and 45 amino acids, or between about 45 and 50 amino acids, as compared to the CoV S polypeptide having an amino acid sequence of SEQ ID NO: 87. In embodiments, the CoV S polypeptides described herein comprise about 1, about 2, about 3, about 4, about 5, about 6, about 7, about 8, about 9, about 10, about 11, about 12, about 13, about 14, about 15, about 16, about 17, about 18, about 19, about 20, about 21, about 22, about 23, about 24, or about 25 substitutions compared to the coronavirus S protein (SEQ ID NO: 87).

[0273] In embodiments, the CoV S polypeptides described herein are at least 95%, at least 96%, at least 97%, at least 98%, at least 99%, or at least 99.5% identical to the CoV S polypeptide having an amino acid sequence selected from any one of SEQ ID NOS: 2, 4, 38, 41, 44, 48, 51, 54, 58, 61, 63, 65, 67, 73, 75, 78, 79, 82, 83, 85, 106, 108, 89, and 110, 112-115, 132, 133, 114, 138, 141, 144, 147, 151, 153, 156, and 158, 164-168. A CoV S polypeptide may have a deletion, an insertion, or mutation of up to about 1, up to about 2, up to about 3, up to about 4, up to about 5, up to about 10, up to about 15, up to about 20, up to about 25, up to about 30, up to about 35, up to about 40, up to about 45, or up to about 50 amino acids compared to the amino acid sequence of the CoV S polypeptide having an amino acid sequence selected from any one of SEQ ID NOS: 2, 4, 38, 41, 44, 48, 51, 54, 58, 61, 63, 65, 67, 73, 75, 78, 79, 82, 83, 85, 106, 108, 89, and 110, 112-115, 132, 133, 114, 138, 141, 144, 147, 151, 153, 156, and 158, 164-168. A CoV S polypeptide may have may have a deletion, an insertion, or mutation of between about 1 and about 5 amino acids, between about 3 and about 10 amino acids, between about 5 and 10 amino acids, between about 8 and 12 amino acids, between about 10 and 15 amino acids, between about 12 and 17 amino acids, between about 15 and 20 amino acids, between about 18 and 23 amino acids, between about 20 and 25 amino acids, between about 22 and about 2.7 amino acids, between about 25 and 30 amino acids, between about 30 and 35 amino acids, between about 35 and 40 amino acids, between about 40 and 45 amino acids, or between about 45 and 50 amino acids, as compared to the CoV S polypeptide having an amino acid sequence selected from any one of SEQ ID NOS: 2, 4, 38, 41, 44, 48, 51, 54, 58, 61, 63, 65, 67, 73, 75, 78, 79, 82, 83, 85, 106, 108, 89, and 110, 112-115, 132, 133, 114, 138, 141, 144, 147, 151, 153, 156, and 158, 164-168. In embodiments, the CoV S polypeptides described herein comprise about 1, about 2, about 3, about 4, about 5, about 6, about 7, about 8, about 9, about 10, about 11, about 12, about 13, about 14, about 15, about 16, about 17, about 18, about 19, about 20, about 21, about 22, about 23, about 24, or about 25 substitutions compared to the coronavirus S protein (SEQ ID NO: 87).

[0274] In embodiments, the coronavirus S polypeptide is extended at the N-terminus, the C-terminus, or both the N-terminus and the C-terminus. In aspects, the extension is a tag useful for a function, such as purification or detection. In aspects the tag contains an epitope. For example, the tag may be a polyglutamate tag, a FLAG-tag, a HA-tag, a polyHis-tag (having about 5-10 histidines) (SEQ ID NO: 101), a hexahistidine tag (SEQ ID NO: 100), an 8×-His-tag (having eight histidines) (SEQ ID NO: 102), a Myc-tag, a Glutathione-S-transferase-tag, a Green fluorescent protein-tag, Maltose binding protein-tag, a Thioredoxin-tag, or an Fc-tag. In other aspects, the extension may be an N-terminal signal peptide fused to the protein to enhance expression. While such signal peptides are often cleaved during expression in the cell, some nanoparticles may contain the antigen with an intact signal peptide. Thus, when a nanoparticle comprises an antigen, the antigen may contain an extension and thus may be a fusion protein when incorporated into nanoparticles. For the purposes of calculating identity to the sequence, extensions are not included. In embodiments, the tag is a protease cleavage site. Non-limiting examples of protease cleavage sites include the HRV3C protease cleavage site, chymotrypsin, trypsin, elastase, endopeptidase, caspase-1, caspase-2, caspase-3, caspase-4, caspase-5, caspase-6, caspase-7, caspase-8, caspase-9, caspase-10, enterokinase, factor Xa, Granzyme B, TEV protease, and thrombin. In embodiments, the protease cleavage site is an HRV3C protease cleavage site. In embodiments, the protease cleavage site comprises an amino acid sequence of SEQ ID NO: 98.

[0275] In embodiments, the CoV S glycoprotein comprises a fusion protein. In embodiments, the CoV S glycoprotein comprises an N-terminal fusion protein. In embodiments, the Cov S glycoprotein comprises a C-terminal fusion protein. In embodiments, the fusion protein encompasses a tag useful for protein expression, purification, or detection. In embodiments, the tag is a polyHis-tag (having about 5-10 histidines), a Myc-tag, a Glutathione-S-transferase-tag, a Green fluorescent protein-tag, Maltose binding protein-tag, a Thioredoxin-tag, a Strep-tag, a Twin-Strep-tag, or an Fc-tag. In embodiments, the tag is an Fc-tag. In embodiments, the Fc-tag is monomeric, dimeric, or trimeric. In embodiments, the tag is a hexahistidine tag, e.g. a polyHis-tag which contains six histidines (SEQ ID NO: 100). In embodiments, the tag is a Twin-Strep-tag with an amino acid sequence of SEQ ID NO: 99.

[0276] In embodiments, the CoV S polypeptide is a fusion protein comprising another coronavirus protein. In embodiments, the other coronavirus protein is from the same coronavirus. In embodiments, the other coronavirus protein is from a different coronavirus.

[0277] In aspects, the CoV S protein may be truncated. For example, the N-terminus may be truncated by about 10 amino acids, about 30 amino acids, about 50 amino acids, about 75 amino acids, about 100 amino acids, or about 200 amino acids. The C-terminus may be truncated instead of or in addition to the N-terminus. For example, the C-terminus may be truncated by about 10 amino acids, about 30 amino acids, about 50 amino acids, about 75 amino acids, about 100 amino acids, or about 200 amino acids. For purposes of calculating identity to the protein having truncations, identity is measured over the remaining portion of the protein.

### Nanoparticles Containing CoV Spike (S) Polypeptides

[0278] In embodiments, the mature CoV S polypeptide antigens are used to produce a vaccine comprising coronavirus S nanoparticles. In embodiments, nanoparticles of the present disclosure comprise the CoV S polypeptides described herein. in embodiments, the nanoparticles of the present disclosure comprise CoV S polypeptides associated with a detergent core. The presence of the detergent facilitates formation of the nanoparticles by forming a core that organizes and presents the antigens. In embodiments, the nanoparticles may contain the CoV S polypeptides assembled into multi-oligomeric glycoprotein-detergent (e.g. PS80) nanoparticles with the head regions projecting outward and hydrophobic regions and PS80 detergent forming a central core surrounded by the glycoprotein. In embodiments, the CoV S polypeptide inherently contains or is adapted to contain a transmembrane domain to promote association of the protein into a detergent core. In embodiments, the CoV S polypeptide contains a head domain. FIG. 10 shows an exemplary structure of a CoV S polypeptide of the disclosure. Primarily the transmembrane domains of a CoV S polypeptide trimer associate with detergent; however, other portions of the polypeptide may also interact. Advantageously, the nanoparticles have improved resistance to environmental stresses such that they provide enhanced stability and/or improved presentation to the immune system due to organization of multiple copies of the protein around the detergent.

[0279] In embodiments, the detergent core is a non-ionic detergent core. In embodiments, the CoV S polypeptide is associated with the non-ionic detergent core. In embodiments, the detergent is selected from the group consisting of polysorbate-20 (PS20), polysorbate-40 (PS40), polysorbate-60 (PS60), polysorbate-65 (PS65) and polysorbate-80 (PS80).

[0280] In embodiments, the detergent is PS80.

[0281] In embodiments, the CoV S polypeptide forms a trimer. In embodiments, the CoV S polypeptide nanoparticles are composed of multiple polypeptide trimers surrounding a non-ionic detergent core. In embodiments, the nanoparticles contain at least about 1 trimer or more. In embodiments, the nanoparticles contain at least about 5 trimers to about 30 trimers of the Spike protein. In embodiments, each nanoparticle may contain 1, 2, 3, 4, 5, 6, 7, 8, 9, 10. 11, 12, or 15, 20, 25, or 30 trimers, including all values and ranges in between. Compositions disclosed herein may contain nanoparticles having different numbers of trimers. For example, a composition may contain nanoparticles where the number of trimers ranges from 2-9; in embodiments, the nanoparticles in a composition may contain from 2-6 trimers. In embodiments, the compositions contain a heterogeneous population of nanoparticles having 2 to 6 trimers per nanoparticle, or 2 to 9 trimers per nanoparticle. In embodiments, the compositions may contain a substantially homogenous population of nanoparticles. For example, the population may contain about 95% nanoparticles having 5 trimers.

[0282] The nanoparticles disclosed herein range in particle size. In embodiments, the nanoparticles disclosed herein range in particle size from a Z-ave size from about 20 nm to about 60 nm, about 20 nm to about 50 nm, about 20 nm to about 45 nm, about 20 nm to about 35 nm, about 20 nm to about 30 nm, about 25 nm to about 35 nm, or about 25 nm to about 45 nm. Particle size (Z-ave) is measured by dynamic light scattering (DLS) using a Zetasizer NanoZS (Malvern, UK), unless otherwise specified.

[0283] In embodiments, the nanoparticles comprising the CoV S polypeptides disclosed herein have a reduced particle size compared to nanoparticles comprising a wild-type CoV S polypeptide. In embodiments, the CoV S polypeptides are at least about 40% smaller in particle size, for example, at least about 40%, at least about 45%, at least about 50%, at least about 55%, at least about 60%, at least about 65%, at least about 70%, at least about 75% , at least about 80%, or at least about 85% smaller in particle size.

[0284] The nanoparticles comprising CoV S polypeptides disclosed herein are more homogenous in size, shape, and mass than nanoparticles comprising a wild-type CoV S polypeptide. The polydispersity index (PDI), which is a measure of heterogeneity, is measured by dynamic light scattering using a Malvern Setasizer unless otherwise specified. In embodiments, the particles measured herein have a PDI from about 0.2 to about 0.45, for example, about 0.2, about 0.25, about 0.29, about 0.3, about 0.35, about 0.40, or about 0.45. In embodiments, the nanoparticles measured herein have a PDI that is at least about 25% smaller than the PDI of nanoparticles comprising the wild-type CoV S polypeptide, for example, at least about 25%, at least about 30%, at least about 35%, at least about 40%, at least about 45%, at least about 50%, at least about 55%, or at least about 60%, smaller.

[0285] The CoV S polypeptides and nanoparticles comprising the same have improved thermal stability as compared to the wild-type CoV S polypeptide or a nanoparticle thereof. The thermal stability of the CoV S polypeptides is measured using differential scanning calorimetry (DSC) unless otherwise specified. The enthalpy of transition (ΔHcal) is the energy required to unfold a CoV S polypeptide. In embodiments, the CoV S polypeptides have an increased ΔHcal as compared to the wild-type CoV S polypeptide. In embodiments, the ΔHcal of a CoV S polypeptide is about 2-fold, about 3-fold, about 4-fold, about 5-fold, about 6-fold, about 7-fold, about 8-fold, about 9-fold, or about 10-fold greater than the ΔHcal of a wild-type CoV S polypeptide.

[0286] Several nanoparticle types may be included in vaccine compositions disclosed herein. In aspects, the nanoparticle type is in the form of an anisotropic rod, which may be a dimer or a monomer. In other aspects, the nanoparticle type is a spherical oligomer. In yet other aspects, the nanoparticle may be described as an intermediate nanoparticle, having sedimentation properties intermediate between the first two types. Formation of nanoparticle types may be regulated by controlling detergent and protein concentration during the production process. Nanoparticle type may be determined by measuring sedimentation co-efficient.

### Production of Nanoparticles Containing CoV S Polypeptide Antigens

[0287] The nanoparticles of the present disclosure are non-naturally occurring products, the components of which do not occur together in nature. Generally, the methods disclosed herein use a detergent exchange approach wherein a first detergent is used to isolate a protein and then that first detergent is exchanged for a second detergent to form the nanoparticles.

[0288] The antigens contained in the nanoparticles are typically produced by recombinant expression in host cells. Standard recombinant techniques may be used. In embodiments, the CoV S polypeptides are expressed in insect host cells using a baculovirus system. In embodiments, the baculovirus is a cathepsin-L knock-out baculovirus, a chitinase knock-out baculovirus. Optionally, the baculovirus is a double knock-out for both cathepsin-L and chitinase. High level expression may be obtained in insect cell expression systems. Non limiting examples of insect cells are, Spodoptera frugiperda (Sf) cells, e.g. Sf9, Sf21, Trichoplusia ni cells, e.g. High Five cells, and Drosophila S2 cells. In embodiments, the CoV S polypeptide described herein are produced in any suitable host cell. In embodiments, the host cell is an insect cell. In embodiments, the insect cell is an Sf9 cell.

[0289] Typical transfection and cell growth methods can be used to culture the cells. Vectors, e.g., vectors comprising polynucleotides that encode fusion proteins, can be transfected into host cells according to methods well known in the art. For example, introducing nucleic acids into eukaryotic cells can be achieved by calcium phosphate co-precipitation, electroporation, microinjection, lipofection, and transfection employing polyamine transfection reagents. In one embodiment, the vector is a recombinant baculovirus.

[0290] Methods to grow host cells include, but are not limited to, batch, batch-fed, continuous and perfusion cell culture techniques. Cell culture means the growth and propagation of cells in a bioreactor (a fermentation chamber) where cells propagate and express protein (e.g. recombinant proteins) for purification and isolation. Typically, cell culture is performed under sterile, controlled temperature and atmospheric conditions in a bioreactor. A bioreactor is a chamber used to culture cells in which environmental conditions such as temperature, atmosphere, agitation and/or pH can be monitored. In one embodiment, the bioreactor is a stainless steel chamber. In another embodiment, the bioreactor is a pre-sterilized plastic bag (e.g. Cellbag®, Wave Biotech, Bridgewater, N.J.). In other embodiment, the pre-sterilized plastic bags are about 50 L to 3500 L bags.

### Extraction and Purification of Nanoparticles Containing CoV Spike (S) Protein Antigens

[0291] After growth of the host cells, the protein may be harvested from the host cells using detergents and purification protocols. Once the host cells have grown for 48 to 96 hours, the cells are isolated from the media and a detergent-containing solution is added to solubilize the cell membrane, releasing the protein in a detergent extract. Triton X-100 and TERGITOL® nonylphenol ethoxylate, also known as NP-9, are each preferred detergents for extraction. The detergent may be added to a final concentration of about 0.1% to about 1.0%. For example, the concentration may be about 0.1%, about 0.2%, about 0.3%, about 0.5%, about 0.7%, about 0.8%, or about 1.0%. The range may be about 0.1% to about 0.3%. In aspects, the concentration is about 0.5%.

[0292] In other aspects, different first detergents may be used to isolate the protein from the host cell. For example, the first detergent may be Bis(polyethylene glycol bis[imidazoylcarbonyl]), nonoxynol-9, Bis(polyethylene glycol bis[imidazoyl carbonyl]), BRIJ® Polyethylene glycol dodecyl ether 35, BRIJ® Polyethylene glycol (3) cetyl ether 56, BRIJ® alcohol ethoxylate 72, BRIJ® Polyoxyl 2 stearyl ether 76, BRIJ® polyethylene glycol monoolelyl ether 92V, BRIJ® Polyoxyethylene (10) oleyl ether 97, BRIJ® Polyethylene glycol hexadecyl ether 58P, CRENTOPHOR® EL Macrogolglycerol ricinoleate, Decaethyleneglycol monododecyl ether, N-Decanoyl-N-methylglucamine, n-Decyl alpha-Dglucopyranoside, Decyl beta-D-maltopyranoside, n-Dodecanoyl-N-methylglucamide, nDodecyl alpha-D-maltoside, n-Dodecyl beta-D-maltoside, n-Dodecyl beta-D-maltoside, Heptaethylene glycol monodecyl ether, Heptaethylene glycol monododecyl ether, Heptaethylene glycol monotetradecyl ether, n-Hexadecyl beta-D-maltoside, Hexaethylene glycol monododecyl ether, Hexaethylene glycol monohexadecyl ether, Hexaethylene glycol monooctadecyl ether, Hexaethylene glycol monotetradecyl ether, Igepal CA-630, Igepal CA-630, Methyl-6-0-(N-heptylcarbamoyl)-alpha-D-glucopyranoside, Nonaethylene glycol monododecyl ether, N-Nonanoyl-N-methylglucamine, N-NonanoyN-methylglucamine, Octaethylene glycol monodecyl ether, Octaethylene glycolmonododecyl ether, Octaethylene glycol monohexadecyl ether, Octaethylene glycol monooctadecyl ether, Octaethylene glycol monotetradecyl ether, Octyl-beta-D glucopyranoside, Pentaethylene glycol monodecyl ether, Pentaethylene glycol monododecyl ether, Pentaethylene glycol monohexadecyl ether, Pentaethylene glycol monohexyl ether, Pentaethylene glycol monooctadecyl ether, Pentaethylene glycol monooctyl ether, Polyethylene glycol diglycidyl ether, Polyethylene glycol ether W-1, Polyoxyethylene 10 tridecyl ether, Polyoxyethylene 100 stearate, Polyoxyethylene 20 isohexadecyl ether, Polyoxyethylene 20 oleyl ether, Polyoxyethylene 40 stearate, Polyoxyethylene stearate, Polyoxyethylene 8 stearate, Polyoxyethylene bis(imidazolyl carbonyl), Polyoxyethylene 25 propylene glycol stearate, Saponin from Quillaja bark, SPAN® 20 sorbitan laurate, SPAN® 40 sorbitan monopalmitate, SPAN® 60 sorbitan stearate, SPAN® 65 sorbitan tristearate, SPAN® 80 sorbitane monooleate, SPAN® 85 sorbitane trioleate, TERGITOL® secondary alcohol ethoxylate Type 15-S-12, TERGITOL® secondary alcohol ethoxylate Type 15-S-30, TERGITOL® secondary alcohol ethoxylate Type 15-S-5, TERGITOL® secondary alcohol ethoxylate Type 15-S-7, TERGITOL® secondary alcohol ethoxylate Type 15-S-9, TERGITOL® nonylphenol ethoxylate Type NP-10, TERGITOL® nonylphenol ethoxylate Type NP-4, TERGUOL® nonylphenol ethoxylate Type NP-40, TERGITOL® nonylphenol ethoxylate Type NP-7, TERGITOL® nonylphenol ethoxylate Type NP-9, TERGITOL® branched secondary alcohol ethoxylate Type TMN-10, TERGITOL® branched secondary alcohol ethoxylate Type TMN-6, TRITON® X-100 Polyethylene glycol tert-octylphenyl ether or combinations thereof.

[0293] The nanoparticles may then be isolated from cellular debris using centrifugation. In embodiments, gradient centrifugation, such as using cesium chloride, sucrose and iodixanol, may be used. Other techniques may be used as alternatives or in addition, such as standard purification techniques including, e.g., ion exchange, affinity, and gel filtration chromatography.

[0294] For example, the first column may be an ion exchange chromatography resin, such as FRACTOGEL® EMD methacrylate based polymeric beads TMAE (EMD Millipore), the second column may be a lentil (Lens culinaris) lectin affinity resin, and the third column may be a cation exchange column such as a FRACTOGEL® EMD methacrylate based polymeric beads SO3 (EMD Millipore) resin. In other aspects, the cation exchange column may be an MMC column or a Nuvia C Prime column (Bio-Rad Laboratories, Inc). Preferably, the methods disclosed herein do not use a detergent extraction column; for example a hydrophobic interaction column. Such a column is often used to remove detergents during purification but may negatively impact the methods disclosed here.

### Detergent Exchange of Nanoparticles Containing CoV S Polypeptide Antigens

[0295] To form nanoparticles, the first detergent, used to extract the protein from the host cell is substantially replaced with a second detergent to arrive at the nanoparticle structure. NP-9 is a preferred extraction detergent. Typically, the nanoparticles do not contain detectable NP-9 when measured by HPLC. The second detergent is typically selected from the group consisting of PS20, PS40, PS60, PS65, and PS80. Preferably, the second detergent is PS80.

[0296] In particular aspects, detergent exchange is performed using affinity chromatography to bind glycoproteins via their carbohydrate moiety. For example, the affinity chromatography may use a legume lectin column. Legume lectins are proteins originally identified in plants and found to interact specifically and reversibly with carbohydrate residues. See, for example, Sharon and Lis, “Legume lectins—a large family of homologous proteins,” FASEB J. 1990 November; 4(14):3198-208; Liener, “The Lectins: Properties, Functions, and Applications in Biology and Medicine,” Elsevier, 2012. Suitable lectins include concanavalin A (con A), pea lectin, sainfoin lest, and lentil lectin. Lentil lectin is a preferred column for detergent exchange due to its binding properties. Lectin columns are commercially available; for example, Capto Lentil Lectin, is available from GE Healthcare. In certain aspects, the lentil lectin column may use a recombinant lectin. At the molecular level, it is thought that the carbohydrate moieties bind to the lentil lectin, freeing the amino acids of the protein to coalesce around the detergent resulting in the formation of a detergent core providing nanoparticles having multiple copies of the antigen, e.g., glycoprotein oligomers which can be dimers, trimers, or tetramers anchored in the detergent. In embodiments, the CoV S polypeptides form trimers. In embodiments, the CoV S polypeptide trimers are anchored in detergent. In embodiments, each CoV S polypeptide nanoparticle contains at least one trimer associated with a non-ionic core.

[0297] The detergent, when incubated with the protein to form the nanoparticles during detergent exchange, may be present at up to about 0.1% (w/v) during early purifications steps and this amount is lowered to achieve the final nanoparticles having optimum stability. For example, the non-ionic detergent (e.g., PS80) may be about 0.005% (v/v) to about 0.1% (v/v), for example, about 0.005% (v/v), about 0.006% (v/v), about 0.007% (v/v), about 0.008% (v/v), about 0.009% (v/v), about 0.01% (v/v), about 0.015% (v/v), about 0.02% (v/v), about 0.025% (v/v), about 0.03% (v/v), about 0.035% (v/v), about 0.04% (v/v), about 0.045% (v/v), about 0.05% (v/v), about 0.055% (v/v), about 0.06% (v/v), about 0.065% (v/v), about 0.07% (v/v), about 0.075% (v/v), about 0.08% (v/v), about 0.085% (v/v), about 0.09% (v/v), about 0.095 (v/v), or about 0.1% (v/v) PS80. In embodiments, the nanoparticle contains about 0.03% to about 0.05% PS80. In embodiments, the nanoparticle contains about 0.01% (v/v) PS80.

[0298] In embodiments, purified CoV S polypeptides are dialyzed. In embodiments, dialysis occurs after purification. In embodiments, the CoV S polypeptides are dialyzed in a solution comprising sodium phosphate, NaCl, and PS80. In embodiments, the dialysis solution comprising sodium phosphate contains between about 5 mM and about 100 mM of sodium phosphate, for example, about 5 mM, about 10 mM, about 15 mM, about 20 mM, about 25 mM, about 30 mM, about 35 mM, about 40 mM, about 45 mM, about 50 mM, about 55 mM, about 60 mM, about 65 mM, about 70 mM, about 75 mM, about 80 mM, about 85 about 90 mM, about 95 mM, or about 100 mM sodium phosphate. In embodiments, the pH of the solution comprising sodium phosphate is about 6.5, about 6.6, about 6.7, about 6.8, about 6.9, about 7.0, about 7.1, about 7.2, about 7.3, about 7.4, or about 7.5. In embodiments, the dialysis solution comprising sodium chloride comprises about 50 mM NaCl to about 500 mM NaCl, for example, about 50 mM, about 60 mM, about 70 mM, about 80 mM, about 90 mM, about 100 mM, about 110 mM, about 120 mM, about 130 mM, about 140 mM, about 150 mM, about 160 mM, about 170 mM, about 180 mM, about 190 mM, about 200 mM, about 210 mM, about 220 mM, about 230 mM, about 240 mM, about 250 mM, about 260 mM, about 270 mM, about 280 mM, about 290 mM, about 300 mM, about 310 mM, about 320 mM, about 330 mM, about 340 mM, about 350 mM, about 360 mM, about 370 mM, about 380 mM, about 390 mM, about 400 mM, about 410 mM, about 420 mM, about 430 mM, about 440 mM, about 450 mM, about 460 mM, about 470 mM, about 480 mM, about 490 mM, or about 500 mM NaCl. In embodiments, the dialysis solution comprising PS80 comprises about 0.005% (v/v), about 0.006% (v/v), about 0.007 (v/v), about 0.008% (v/v), about 0.009 (v/v), about 0.01% (v/v), about 0.015% (v/v), about 0.02% (v/v), about 0.025% (v/v), about 0.03% (v/v), about 0.035% (v/v), about 0.04% (v/v), about 0.045% (v/v), about 0.05% (v/v), about 0.055 (v/v), about 0.06 (v/v), about 0.065 (v/v), about 0.07% (v/v), about 0.075% (v/v), about 0.08% (v/v), about 0.085% (v/v), about 0.09% (v/v), about 0.095% (v/v), or about 0.1% (v/v) PS80. In embodiments, the dialysis solution comprises about 25 mM sodium phosphate (pH 7.2), about 300 mM NaCl, and about 0.01% (v/v) PS80.

[0299] Detergent exchange may be performed with proteins purified as discussed above and purified, frozen for storage, and then thawed for detergent exchange.

[0300] Stability of compositions disclosed herein may be measured in a variety of ways. In one approach, a peptide map may be prepared to determine the integrity of the antigen protein after various treatments designed to stress the nanoparticles by mimicking harsh storage conditions. Thus, a measure of stability is the relative abundance of antigen peptides in a stressed sample compared to a control sample. For example, the stability of nanoparticles containing the CoV S polypeptides may be evaluated by exposing the nanoparticles to various pHs, proteases, salt, oxidizing agents, including but not limited to hydrogen peroxide, various temperatures, freeze/thaw cycles, and agitation. FIGS. 12A-B show that BV2373 (SEQ ID NO: 87) and BV2365 (SEQ ID NO: 4) retain binding to hACE2 under a variety of stress conditions. It is thought that the position of the glycoprotein anchored into the detergent core provides enhanced stability by reducing undesirable interactions. For example, the improved protection against protease-based degradation may be achieved through a shielding effect whereby anchoring the glycoproteins into the core at the molar ratios disclosed herein results in steric hindrance blocking protease access. Stability may also be measured by monitoring intact proteins. FIG. 33 and FIG. 34 compare nanoparticles containing CoV polypeptides having amino acid sequences of SEQ ID NO: 109 and 87, respectively. FIG. 34 indicates that CoV polypeptides having an amino acid sequence of SEQ ID NO: 87 show particularly good stability during purification. The polypeptide of FIG. 34 comprises a furin cleavage site having an amino acid sequence of QQAQ (SEQ ID NO: 7).

### Vaccine Compositions Containing CoV S Polypeptide Antigens

[0301] The disclosure provides vaccine compositions comprising CoV S polypeptides, for example, in a nanoparticle. In aspects, the vaccine composition may contain nanoparticles with antigens from more than one viral strain from the same species of virus. In another embodiment, the disclosures provide for a pharmaceutical pack or kit comprising one or more containers filled with one or more of the components of the vaccine compositions.

[0302] Compositions disclosed herein may be used either prophylactically or therapeutically, but will typically be prophylactic. Accordingly, the disclosure includes methods for treating or preventing infection. The methods involve administering to the subject a therapeutic or prophylactic amount of the immunogenic compositions of the disclosure. Preferably, the pharmaceutical composition is a vaccine composition that provides a protective effect. In other aspects, the protective effect may include amelioration of a symptom associated with infection in a percentage of the exposed population. For example, the composition may prevent or reduce one or more virus disease symptoms selected from: fever fatigue, muscle pain, headache, sore throat, vomiting, diarrhea, rash, symptoms of impaired kidney and liver function, internal bleeding and external bleeding, compared to an untreated subject.

[0303] The nanoparticles may be formulated for administration as vaccines in the presence of various excipients, buffers, and the like. For example, the vaccine compositions may contain sodium phosphate, sodium chloride, and/or histidine. Sodium phosphate may be present at about 10 mM to about 50 mM, about 15 mM to about 25 mM, or about 25 mM; in particular cases, about 22 mM sodium phosphate is present. Histidine may be present about 0.1% (w/v), about 0.5% (w/v), about 0.7% (w/v), about 1% (w/v), about 1.5% (w/v), about 2% (w/v), or about 2.5% (w/v). Sodium chloride, when present, may be about 150 mM. In certain compositions, the sodium chloride may be present in higher concentrations, for example from about 200 mM to about 500 mM. In embodiments, the sodium chloride is present in a high concentration, including but not limited to about 200 mM, about 250 mM, about 300 mM, about 350 mM, about 400 mM, about 450 mM, or about 500 mM.

[0304] In embodiments, the nanoparticles described herein have improved stability at certain pH levels. In embodiments, the nanoparticles are stable at slightly acidic pH levels. For example, the nanoparticles that are stable at a slightly acidic pH, for example from pH 5.8 to pH 7.0. In embodiments, the nanoparticles and compositions containing nanoparticles may be stable at pHs ranging from about pH 5.8 to about pH 7.0, including about pH 5.9 to about pH 6.8, about pH 6.0 to about pH 6.5, about pH 6.1 to about pH 6.4, about pH 6.1 to about pH 6.3, or about pH 6.2. In embodiments, the nanoparticles and compositions described herein are stabile at neutral pHs, including from about pH 7.0 to about pH 7.4. In embodiments, the nanoparticles and compositions described herein are stable at slightly alkaline pHs, for example from about pH 7.0 to about pH 8.5, from about pH 7.0 to about pH 8.0, or from about pH 7.0 to about pH 7.5, including all values and ranges in between.

### Adjuvants

[0305] In certain embodiments, the compositions disclosed herein may be combined with one or more adjuvants to enhance an immune response. In other embodiments, the compositions are prepared without adjuvants, and are thus available to be administered as adjuvant-free compositions. Advantageously, adjuvant-free compositions disclosed herein may provide protective immune responses when administered as a single dose. Alum-free compositions that induce robust immune responses are especially useful in adults about 60 and older.

### Aluminum-Based Adjuvants

[0306] In embodiments, the adjuvant may be alum (e.g. AlPO₄ or Al(OH)₃). Typically, the nanoparticle is substantially bound to the alum. For example, the nanoparticle may be at least 80% bound, at least 85% bound, at least 90% bound or at least 95% bound to the alum. Often, the nanoparticle is 92% to 97% bound to the alum in a composition. The amount of alum is present per dose is typically in a range between about 400 μg to about 1250 μg. For example, the alum may be present in a per dose amount of about 300 μg to about 900 μg, about 400 μg to about 800 μg, about 500 μg to about 700 μg, about 400 μg to about 600 μg, or about 400 μg to about 500 μg. Typically, the alum is present at about 400 μg for a dose of 120 μg of the protein nanoparticle.

### Saponin Adjuvants

[0307] Adjuvants containing saponin may also be combined with the immunogens disclosed herein. Saponins are glycosides derived from the bark of the Quillaja saponaria Molina tree. Typically, saponin is prepared using a multi-step purification process resulting in multiple fractions. As used, herein, the term “a saponin fraction from Quillaja saponaria Molina” is used genetically to describe a semi-purified or defined saponin fraction of Quillaja saponaria or a substantially pure fraction thereof.

### Saponin Fractions

[0308] Several approaches for producing saponin fractions are suitable. Fractions A, B, and C are described in U.S. Pat. No. 6,352,697 and may be prepared as follows. A lipophilic fraction from Quil A, a crude aqueous Quillaja saponaria Molina extract, is separated by chromatography and eluted with 70% acetonitrile in water to recover the lipophilic fraction. This lipophilic fraction is then separated by semi-preparative HPLC with elution using a gradient of from 25% to 60% acetonitrile in acidic water. The fraction referred to herein as “Fraction A” or “QH-A” is, or corresponds to, the fraction, which is eluted at approximately 39% acetonitrile. The fraction referred to herein as “Fraction B” or “QH-B” is, or corresponds to, the fraction, which is eluted at approximately 47% acetonitrile. The fraction referred to herein as “Fraction C” or “QH-C” is, or corresponds to, the fraction, which is eluted at approximately 49% acetonitrile. Additional information regarding purification of Fractions is found in U.S. Pat. No. 5,057,540. When prepared as described herein, Fractions B and C of Quillaja saponaria Molina each represent groups or families of chemically closely related molecules with definable properties. The chromatographic conditions under which they are obtained are such that the batch-to-batch reproducibility in terms of elution profile and biological activity is highly consistent.

[0309] Other saponin fractions have been described. Fractions B3, B4 and B4b are described in EP 0436620. Fractions QA1-QA22 are described EP03632279 B2, Q-VAC (Nor-Feed, AS Denmark), Quillaja saponaria Molina Spikoside (Isconova AB, Ultunaallén 2B, 756 51 Uppsala, Sweden). Fractions QA-1, QA-2, QA-3, QA-4, QA-5, QA-6, QA-7, QA-8, QA-9, QA-10, QA-11, QA-12, QA-13, QA-14, QA-15, QA-16, QA-17, QA-18, QA-19, QA-20, QA-21, and QA-22 of EP 0 3632 279 B2, especially QA-7, QA-17 QA-18, and QA-21 may be used. They are obtained as described in EP 0 3632 279 B2, especially at page 6 and in Example 1 on page 8 and 9.

[0310] The saponin fractions described herein and used for forming adjuvants are often substantially pure fractions; that is, the fractions are substantially free of the presence of contamination from other materials. In particular aspects, a substantially pure saponin fraction may contain up to 40% by weight, up to 30% by weight, up to 25% by weight, up to 20% by weight, up to 15% by weight, up to 10% by weight, up to 7% by weight, up to 5% by weight, up to 2% by weight, up to 1% by weight, up to 0.5% by weight, or up to 0.1% by weight of other compounds such as other saponins or other adjuvant materials.

### ISCOM Structures

[0311] Saponin fractions may be administered in the form of a cage-like particle referred to as an ISCOM (Immune Stimulating COMplex). ISCOMs may be prepared as described in EP0109942B1, EP0242380B1 and EP0180546 B1. In particular embodiments a transport and/or a passenger antigen may be used, as described in EP 9600647-3 (PCT/SE97/00289).

### Matrix Adjuvants

[0312] In embodiments, the ISCOM is an ISCOM matrix complex. An ISCOM matrix complex comprises at least one saponin fraction and a lipid. The lipid is at least a sterol, such as cholesterol. In particular aspects, the ISCOM matrix complex also contains a phospholipid. The ISCOM matrix complexes may also contain one or more other immunomodulatory (adjuvant-active) substances, not necessarily a glycoside, and may be produced as described in EP0436620B1, which is incorporated by reference in its entirety herein.

[0313] In other aspects, the ISCOM is an ISCOM complex. An ISCOM complex contains at least one saponin, at least one lipid, and at least one kind of antigen or epitope. The ISCOM complex contains antigen associated by detergent treatment such that that a portion of the antigen integrates into the particle. In contrast, ISCOM matrix is formulated as an admixture with antigen and the association between ISCOM matrix particles and antigen is mediated by electrostatic and/or hydrophobic interactions.

[0314] According to one embodiment, the saponin fraction integrated into an ISCOM matrix complex or an ISCOM complex, or at least one additional adjuvant, which also is integrated into the ISCOM or ISCOM matrix complex or mixed therewith, is selected from fraction A, fraction B, or fraction C of Quillaja saponaria, a semipurified preparation of Quillaja saponaria, a purified preparation of Quillaja saponaria, or any purified sub-fraction e.g., QA 1-21.

[0315] In particular aspects, each ISCOM particle may contain at least two saponin fractions. Any combinations of weight % of different saponin fractions may be used. Any combination of weight % of any two fractions may be used. For example, the particle may contain any weight % of fraction A and any weight % of another saponin fraction, such as a crude saponin fraction or fraction C, respectively. Accordingly, in particular aspects, each ISCOM matrix particle or each ISCOM complex particle may contain from 0.1 to 99.9 by weight, 5 to 95% by weight, 10 to 90% by weight 15 to 85% by weight, 20 to 80% by weight, 25 to 75% by weight, 30 to 70% by weight, 35 to 65% by weight, 40 to 60% by weight, 45 to 55% by weight, 40 to 60% by weight, or 50% by weight of one saponin fraction, e.g. fraction A and the rest up to 100% in each case of another saponin e.g. any crude fraction or any other faction e.g. fraction C. The weight is calculated as the total weight of the saponin fractions. Examples of ISCOM matrix complex and ISCOM complex adjuvants are disclosed in U.S Published Application No. 2013/0129770, which is incorporated by reference in its entirety herein.

[0316] In particular embodiments, the ISCOM matrix or ISCOM complex comprises from 5-99% by weight of one fraction, e.g. fraction A and the rest up to 100% of weight of another fraction e.g. a crude saponin fraction or fraction C. The weight is calculated as the total weight of the saponin fractions.

[0317] In another embodiment, the ISCOM matrix or ISCOM complex comprises from 40% to 99% by weight of one fraction, e.g. fraction A and from 1% to 60% by weight of another fraction, e.g. a crude saponin fraction or fraction C. The weight is calculated as the total weight of the saponin fractions.

[0318] In yet another embodiment, the ISCOM matrix or ISCOM complex comprises from 70% to 95% by weight of one fraction e.g., fraction A, and from 30% to 5% by weight of another fraction, e.g., a crude saponin fraction, or fraction C. The weight is calculated as the total weight of the saponin fractions. In other embodiments, the saponin fraction from Quillaja saponaria Molina is selected from any one of QA 1-21.

[0319] In addition to particles containing mixtures of saponin fractions, ISCOM matrix particles and ISCOM complex particles may each be formed using only one saponin fraction. Compositions disclosed herein may contain multiple particles wherein each particle contains only one saponin fraction. That is, certain compositions may contain one or more different types of ISCOM-matrix complexes particles and/or one or more different types of ISCOM complexes particles, where each individual particle contains one saponin fraction from Quillaja saponaria Molina, wherein the saponin fraction in one complex is different from the saponin fraction in the other complex particles.

[0320] In particular aspects, one type of saponin fraction or a crude saponin fraction may be integrated into one ISCOM matrix complex or particle and another type of substantially pure saponin fraction, or a crude saponin fraction, may be integrated into another ISCOM matrix complex or particle. A composition or vaccine may comprise at least two types of complexes or particles each type having one type of saponins integrated into physically different particles.

[0321] In the compositions, mixtures of ISCOM matrix complex particles and/or ISCOM complex particles may be used in which one saponin fraction Quillaja saponaria Molina and another saponin fraction Quillaja saponaria Molina are separately incorporated into different ISCOM matrix complex particles and/or ISCOM complex particles.

[0322] The ISCOM matrix or ISCOM complex particles, which each have one saponin fraction, may be present in composition at any combination of weight %. In particular aspects, a composition may contain 0.1% to 99.9% by weight, 5% to 95% by weight, 10% to 90% by weight, 15% to 85% by weight, 20% to 80% by weight, 25% to 75% by weight, 30% to 70% by weight, 35% to 65% by weight, 40% to 60% by weight, 45% to 55% by weight, 40 to 60% by weight, or 50% by weight, of an ISCOM matrix or complex containing a first saponin fraction with the remaining portion made up by an ISCOM matrix or complex containing a different saponin fraction. In aspects, the remaining portion is one or more ISCOM matrix or complexes where each matrix or complex particle contains only one saponin fraction. In other aspects, the ISCOM matrix or complex particles may contain more than one saponin fraction.

[0323] In particular compositions, the only saponin fraction in a first ISCOM matrix or ISCOM complex particle is Fraction A and the only saponin fraction in a second ISCOM matrix or ISCOM complex particle is Fraction C.

[0324] Preferred compositions comprise a first ISCOM matrix containing Fraction A and a second ISCOM matrix containing Fraction C, wherein the Fraction A ISCOM matrix constitutes about 70% per weight of the total saponin adjuvant, and the Fraction C ISCOM matrix constitutes about 30% per weight of the total saponin adjuvant. In another preferred composition, the Fraction A ISCOM matrix constitutes about 85% per weight of the total saponin adjuvant, and the Fraction C ISCOM matrix constitutes about 15% per weight of the total saponin adjuvant. Thus, in certain compositions, the Fraction A ISCOM matrix is present in a range of about 70% to about 85%, and Fraction C ISCOM matrix is present in a range of about 15% to about 30%, of the total weight amount of saponin adjuvant in the composition. In embodiments, the Fraction A ISCOM matrix accounts for 50-96% by weight and Fraction C ISCOM matrix accounts for the remainder, respectively, of the sums of the weights of Fraction A ISCOM matrix and Fraction C ISCOM in the adjuvant. In a particularly preferred composition, referred to herein as MATRIX-M™, the Fraction A ISCOM matrix is present at about 85% and Fraction C ISCOM matrix is present at about 15% of the total weight amount of saponin adjuvant in the composition. MATRIX-M™ may be referred to interchangeably as Matrix-M1.

[0325] Exemplary QS-7 and QS-21 fractions, their production and their use is described in U.S. Pat. Nos. 5,057,540; 6,231,859; 6,352,697; 6,524,584; 6,846,489; 7,776,343, and 8,173,141, which are incorporated by reference herein.

[0326] In embodiments, other adjuvants may be used in addition or as an alternative. The inclusion of any adjuvant described in Vogel et al., “A Compendium of Vaccine Adjuvants and Excipients (2nd Edition),” herein incorporated by reference in its entirety for all purposes, is envisioned within the scope of this disclosure. Other adjuvants include complete Freund's adjuvant (a non-specific stimulator of the immune response containing killed Mycobacterium tuberculosis), incomplete Freund's adjuvants and aluminum hydroxide adjuvant. Other adjuvants comprise GMCSP, BCG, MDP compounds, such as thur-MDP and nor-MDP, CGP (MTP-PE), lipid A, and monophosphoryl lipid A (MPL), MF-59, RIBI, which contains three components extracted from bacteria, MPL, trehalose dimycolate (TDM) and cell wall skeleton (CWS) in a 2% squalene/TWEEN® polysorbate 80 emulsion. In embodiments, the adjuvant may be a paucilamellar lipid vesicle; for example, NOVASOMES®. NOVASOMES® are paucilamellar nonphospholipid vesicles ranging from about 100 nm to about 500 nm. They comprise BRIJ® alcohol ethoxylate 72, cholesterol, oleic acid and squalene. NOVASOMES® have been shown to be an effective adjuvant (see, U.S. Pat, Nos. 5,629,021, 6,387,373, and 4,911,928.

### Administration and Dosage

[0327] In embodiments, the disclosure provides a method for eliciting an immune response against one or more coronaviruses. In embodiments, the response is against one or more of the SARS-CoV-2 virus, MERS, and SARS. In embodiments, the response is against a heterogeneous SARS-CoV-2 strain. Non-limiting examples of heterogeneous SARS-CoV-2 strains include the Cal.20C SARS-CoV-2 strain, P.1 SARS-CoV-2 strain, B.1.351 SARS-CoV-2 strain, and B.1.1.7 SARS-CoV-2 strain. The method involves administering an immunologically effective amount of a composition containing a nanoparticle or containing a recombinant CoV Spike (S) polypeptide to a subject. Advantageously, the proteins disclosed herein induce one or more of particularly useful anti-coronavirus responses.

[0328] In embodiments, the nanoparticles or CoV S polypeptides are administered with an adjuvant. In aspects, the nanoparticles or CoV S polypeptides are administered without an adjuvant. In aspects, the adjuvant may be bound to the nanoparticle, such as by a non-covalent interaction. In other aspects, the adjuvant is co-administered with the nanoparticle but the adjuvant and nanoparticle do not interact substantially.

[0329] In embodiments, the nanoparticles or CoV S polypeptides may be used for the prevention and/or treatment of one or more of a SARS-CoV-2 infection, a heterogeneous SARS-CoV-2 strain infection, a SARS infection, or a MERS infection. Thus, the disclosure provides a method for eliciting an immune response against one or more of the SARS-CoV-2 virus, heterogeneous SARS-CoV-2 virus, MERS, and SARS. The method involves administering an immunologically effective amount of a composition containing a nanoparticle or a CoV S polypeptide to a subject. Advantageously, the proteins disclosed herein induce particularly useful anti-coronavirus responses.

[0330] In embodiments, compositions containing the nanoparticles or CoV S polypeptides described herein induce a protective response against SARS-CoV-2 or a heterogeneous SARS-CoV-2 strain in a subject for up to about 3 months, up to about 4 months, up to about 5 months, up to about 6 months, up to about 7 months, up to about 8 months, up to about 9 months, up to about 10 months, up to about 11 months, up to about 12 months, up to about 13 months, up to about 14 months, up to about 15 months, up to about 16 months, up to about 17 months, up to about 18 months, up to about 19 months, up to about 20 months, up to about 21 months, up to about 22 months, up to about 23 months, up to about 24 months, up to about 2.5 years, up to about 3 years, up to about 3.5 years, up to about 4 years, up to about 4.5 years, up to about 5 years after a last dose of nanoparticle or CoV S polypeptide. In embodiments, the nanoparticles or CoV S polypeptides described herein induce a protective response in a subject for at least 6 months.

[0331] In embodiments, the protective response is against an asymptomatic infection caused. by SARS-CoV-2 or a heterogeneous SARS-CoV-2 strain. In embodiments, the protective response is against a symptomatic infection caused by SARS-CoV-2 or a heterogeneous SARS-CoV-2 strain.

[0332] In embodiments, compositions containing the nanoparticles or CoV S polypeptides described herein have an efficacy at preventing coronavirus disease-19 (COVID-19) from a SARS-CoV-2 virus or a heterogeneous SARS-CoV-2 strain (e.g., a B.1.1.7 SARS-CoV-2 strain, B.1.351 SARS-CoV-2 strain, P.1 SARS-CoV-2 strain, B.1.617.2 SARS-CoV-2 strain, B.1.525 SARS-CoV-2 strain, B.1.526 SARS-CoV-2 strain, B.1.617.1 SARS-CoV-2 strain, a C.37 SARS-CoV-2 strain, B.1.621 SARS-CoV-2 strain, or a Cal.20C BARS-CoV-2 strain) that is from about 50% to about 99%, from about 80% to about 99%, from about 75% to about 99%, from about 80% to about 95%, from about 90% to about 98%, from about 75% to about 95%, from about 80% to about 90%, from about 85% to about 95%, from about 80% to about 95%, at least about 50%, at least about 55%, at least about 60%, at least about 65%, at least about 70%, at least about 75%, at least about 80%, at least about 85%, at least about 90%, at least about 91%, at least about 92%, at least about 93%, at least about 94%, at least about 95%, at least about 96%, at least about 97%, at least about 98%, or at least about 99% for up to about 1 month, up to about 2 months, up to about 2.5 months, up to about 3 months, up to about 3.5 months, up to about 4 months, up to about 4.5 months, up to about 5 months, up to about 5.5 months, up to about 6 months, up to about 6.5 months, up to about 7 months, up to about 7.5 months, up to about 8 months, up to about 8.5 months, up to about 9 months, up to about 9.5 months, up to about 10 months, up to about 10.5 months, up to about 11 months, up to about 11.5 months, up to about 12 months, up to about 12.5 months, up to about 13 months, up to about 13.5 months, up to about 14 months, up to about 14.5 months, up to about 15 months, up to about 15.5 months, up to about 16 months, up to about 16.5 months, up to about 17 months, up to about 17.5 months, up to about 18 months, up to about 18.5 months, up to about 19 months, up to about 19.5 months, up to about 20 months, up to about 20.5 months, up to about 21 months, up to about 21.5 months, up to about 22 months, up to about 22.5 months, up to about 23 months, up to about 23.5 months, up to about 24 months, up to about 2.1 years, up to about 2.2 years, up to about 2.3 years, up to about 2.4 years, up to about 2.5 years, up to about 2.6 years, up to about 2.7 years, up to about 2.8 years, up to about 2.9 years, up to about 3 years, or longer after administration of the last dose of nanoparticles or CoV S polypeptides described herein. In embodiments, the COVID-19 is mild COVID-19. In embodiments, the COVID-19 is moderate COVID-19. In embodiments, the COVID-19 is severe COVID-19. In embodiments, the COVID-19 is asymptomatic COVID-19.

[0333] In embodiments, compositions containing the nanoparticles or CoV S polypeptides described herein have an efficacy against a SARS-CoV-2 virus or a heterogeneous SARS-CoV-2 strain of at least 82% for up to about 7.5 months after administration of the last dose of nanoparticles or CoV S polypeptides described herein. In embodiments, compositions containing the nanoparticles or CoV S polypeptides described herein have an efficacy against a SARS-CoV-2 virus or a heterogeneous SARS-CoV-2 strain of 80% to about 90% for up to about 7.5 months after administration of the last dose of nanoparticles or CoV S polypeptides described herein.

[0334] In embodiments, compositions containing the nanoparticles or CoV S polypeptides have an efficacy of at least 75% against asymptomatic disease. In embodiments, the nanoparticles or CoV S polypeptides have an efficacy of from 80% to 90%, from 80% to 99%, from 82% to 99%, from 82% to 95%, from 85% to 95%, from 85% to 99%, from 85% to 97%, at least 80%, at least 81%, at least 82%, at least 83%, at least 84%, at least 85%, at least 86%, at least 87%, at least 88%, at least 89%, at least 90%, at least 91%, at least 92%, at least 93%, at least 94%, at least 95%, at least 96%, at least 97%, at least 98%, at least 99%, or 100% against symptomatic COVID-19 for up to about 1 month, up to about 2 months, up to about 2.5 months, up to about 3 months, up to about 3.5 months, up to about 4 months, up to about 4.5 months, up to about 5 months, up to about 5.5 months, up to about 6 months, up to about 6.5 months, up to about 7 months, up to about 7.5 months, up to about 8 months, up to about 8.5 months, up to about 9 months, up to about 9.5 months, up to about 10 months, up to about 10.5 months, up to about 11 months, up to about 11.5 months, up to about 12 months, up to about 12.5 months, up to about 13 months, up to about 13.5 months, up to about 14 months, up to about 14.5 months, up to about 15 months, up to about 15.5 months, up to about 16 months, up to about 16.5 months, up to about 17 months, up to about 17.5 months, up to about 18 months, up to about 18.5 months, up to about 19 months, up to about 19.5 months, up to about 20 months, up to about 20.5 months, up to about 21 months, up to about 21.5 months, up to about 22 months, up to about 22.5 months, up to about 23 months, up to about 23.5 months, or up to about 24 months, or more.

[0335] In embodiments, compositions containing the nanoparticles or CoV S polypeptides have an efficacy of from 95% to 97%, from 95% to 99%, from 95% to 98%, at least 95%, at least 96%, at least 97%, at least 98%, at least 99%, or 100% against severe COVID-19 for up to about 1 month, up to about 2 months, up to about 2.5 months, up to about 3 months, up to about 3.5 months, up to about 4 months, up to about 4.5 months, up to about 5 months, up to about 5.5 months, up to about 6 months, up to about 6.5 months, up to about 7 months, up to about 7.5 months, up to about 8 months, up to about 8.5 months, up to about 9 months, up to about 9.5 months, up to about 10 months, up to about 10.5 months, up to about 11 months, up to about 11.5 months, up to about 12 months, up to about 12.5 months, up to about 13 months, up to about 13.5 months, up to about 14 months, up to about 14.5 months, up to about 15 months, up to about 15.5 months, up to about 16 months, up to about 16.5 months, up to about 17 months, up to about 17.5 months, up to about 18 months, up to about 18.5 months, up to about 19 months, up to about 19.5 months, up to about 2.0 months, up to about 20.5 months, up to about 21 months, up to about 21.5 months, up to about 22 months, up to about 22.5 months, up to about 23 months, up to about 23.5 months, or up to about 24 months, or more.

[0336] In embodiments, compositions containing the nanoparticles or CoV S polypeptides have an efficacy of from 75% to 95%, from 75% to 90%, from 75% to 85%, from 75% to 98%, from 80% to 98%, from 80% to 95%, from 80% to 90%, from 85% to 98%, from 85% to 95%, at least 75%, at least 76%, at least 77%, at least 78%, at least 79%, at least 80%, at least 81%, at least 82%, at least 83%, at least 84%, at least 85%, at least 86%, at least 87%, at least 88%, at least 89%, at least 90%, at least 91%, at least 92%, at least 93%, at least 94%, at least 95%, at least 96%, at least 97%, at least 98%, at least 99%, or 100% against moderate COVID-19 for up to about 1 month, up to about 2 months, up to about 2.5 months, up to about 3 months, up to about 3.5 months, up to about 4 months, up to about 4.5 months, up to about 5 months, up to about 5.5 months, up to about 6 months, up to about 6.5 months, up to about 7 months, up to about 7.5 months, up to about 8 months, up to about 8,5 months, up to about 9 months, up to about 9.5 months, up to about 10 months, up to about 10.5 months, up to about 11 months, up to about 11.5 months, up to about 12 months, up to about 12.5 months, up to about 13 months, up to about 13.5 months, up to about 14 months, up to about 14.5 months, up to about 15 months, up to about 15.5 months, up to about 16 months, up to about 16.5 months, up to about 17 months, up to about 17.5 months, up to about 18 months, up to about 18.5 months, up to about 19 months, up to about 19.5 months, up to about 20 months, up to about 20.5 months, up to about 21 months, up to about 21.5 months, up to about 22 months, up to about 22.5 months, up to about 23 months, up to about 23.5 months, or up to about 24 months, or more.

[0337] In embodiments, compositions containing the nanoparticles or CoV S polypeptides have an efficacy of from 40% to 95%, from 40% to 90%, from 40% to 85%, from 40% to 80%, from 40% to 75%, from 40% to 70%, from 40% to 65%, from 40% to 60%, from 50% to 95%, from 50% to 90%, from 50% to 85%, from 50% to 80%, from 50% to 75%, from 50% to 70%, from 50% to 65%, from 50% to 60%, at least 40%, at least 41%, at least 42%, at least 43%, at least 44%, at least 45%, at least 46%, at least 47%, at least 48%, at least 49%, at least 50%, at least 51%, at least 52%, at least 53%, at least 54%, at least 55%, at least 56%, at least 57% at least 58%, at least 59%, at least 60%, at least 61%, at least 62%, at least 63%, at least 64%, at least 65%, at least 66%, at least 67%, at least 68%, at least 69%, at least 70%, at least 71%, at least 72%, at least 73%, at least 74%, at least 75%, at least 76%, at least 77%, at least 78%, at least 79%, at least 80%, at least 81%, at least 82%, at least 83%, at least 84%, at least 85%, at least 86%, at least 87%, at least 88%, at least 89%, at least 90%, at least 91%, at least 92%, at least 93%, at least 94%, at least 95%, at least 96%, at least 97%, at least 98%, at least 99%, or 100% against mild COVID-19 for up to about 1 month, up to about 2 months, up to about 2.5 months, up to about 3 months, up to about 3.5 months, up to about 4 months, up to about 4.5 months, up to about 5 months, up to about 5.5 months, up to about 6 months, up to about 6.5 months, up to about 7 months, up to about 7.5 months, up to about 8 months, up to about 8.5 months, up to about 9 months, up to about 9.5 months, up to about 10 months, up to about 10.5 months, up to about 11 months, up to about 11.5 months, up to about 12 months, up to about 12.5 months, up to about 13 months, up to about 13.5 months, up to about 14 months, up to about 14.5 months, up to about 15 months, up to about 15.5 months, up to about 16 months, up to about 16.5 months, up to about 17 months, up to about 17.5 months, up to about 18 months, up to about 18.5 months, up to about 19 months, up to about 19.5 months, up to about 20 months, up to about 20.5 months, up to about 21 months, up to about 21.5 months, up to about 22 months, up to about 22.5 months, up to about 23 months, up to about 23.5 months, or up to about 24 months, or more.

[0338] Compositions disclosed herein may be administered via a systemic route or a mucosal route or a transdermal route or directly into a specific tissue. As used herein, the term “systemic administration” includes parenteral routes of administration. In particular, parenteral administration includes subcutaneous, intraperitoneal, intravenous, intraarterial, intramuscular, or intrasternal injection, intravenous, or kidney dialytic infusion techniques. Typically, the systemic, parenteral administration is intramuscular injection. As used herein, the term “mucosal administration” includes oral, intranasal, intravaginal, intra-rectal, intra-tracheal, intestinal and ophthalmic administration. Preferably, administration is intramuscular.

[0339] Compositions may be administered on a single dose schedule or a multiple dose schedule. Multiple doses may be used in a primary immunization schedule or in a booster immunization schedule. In embodiments, about 1, 2, 3, 4, 5, 6, 7, 8, 9, 10, 11, 12, 13, 14, 15, 16, 17, 18, 19, 20, 21, 22, 23, 24, 25, 26, 27, 28, 29, or 30 doses are administered. In a multiple dose schedule the various doses may be given by the same or different routes e.g., a parenteral prime and mucosal boost, a mucosal prime and parenteral boost, etc. In aspects, a boost dose is administered about 2 weeks, about 3 weeks, about 4 weeks, about 5 weeks, about 6 weeks, about 2 months, about 3 months, about 4 months, about 5 months, about 6 months, about 7 months, about 8 months, about 9 months, about 10 months, about 11 months, about 12 months (1 year), about 2 years, about 3 years, about 4 years, about 5 years, about 6 years, about 7 years, about 8 y ears, about 9 years, or about 10 years after the first dose. In embodiments, a boost dose is administered every year after administration of the initial dose. In embodiments, the follow-on boost dose is administered 3 weeks or 4 weeks after administration of the prior dose. In embodiments, the first dose is administered at day 0, and the boost dose is administered at day 21. In embodiments, the first dose is administered at day 0, and the boost dose is administered at day 28. In embodiments, the first dose is administered at day 0, a boost dose is administered at day 21, and a second boost dose is administered about six months after administration of the first dose. In embodiments, the first dose is administered at day 0, and the boost dose is administered at day 28, and a second boost dose is administered about six months after administration of the first dose. In embodiments, the first dose is administered at day 0, a boost dose is administered at day 21, and a second boost dose is administered about six months after administration of the second dose. In embodiments, the first dose is administered at day 0, and the boost dose is administered at day 28, and a second boost dose is administered about six months after administration of the second dose.

[0340] In embodiments, the boost dose comprises the same immunological composition as the initial dose. In embodiments, the boost dose comprises a different immunological composition than the initial dose. In embodiments, the different immunological composition is a SARS-CoV-2 Spike glycoprotein, an mRNA encoding a SARS-Cov-2 Spike glycoprotein, a plasmid DNA encoding a SARS-Cov-2 Spike glycoprotein, an viral vector encoding a SARS-Cov-2 Spike glycoprotein, or an inactivated SARS-CoV-2 virus. In embodiments, the boost dose comprises the initial composition. In embodiments, the initial dose comprises a SARS-CoV-2 S glycoprotein (e.g., a SARS CoV-2 S glycoprotein having the amino acid sequence of SEQ ID NO: 87), and the boost dose comprises the same SARS-CoV-2 S glycoprotein (e.g., a SARS CoV-2 S glycoprotein having the amino acid sequence of SEQ ID NO: 87). In embodiments, the initial dose comprises a SARS-CoV-2 S glycoprotein (e.g., a SARS CoV-2 S glycoprotein having the amino acid sequence of SEQ ID NO: 87), and the boost dose comprises a different SARS-CoV-2 S glycoprotein (e.g., a SARS CoV-2 S glycoprotein having the amino acid sequence of SEQ ID NO: 132). In embodiments, the initial dose comprises a combination of SARS-CoV-2 S glycoproteins (e.g., a SARS CoV-2 S glycoprotein having the amino acid sequence of SEQ ID NO: 87 and a SARS CoV-2 S glycoprotein having the amino acid sequence of SEQ ID NO: 132). In embodiments, the boost dose comprises a combination of SARS-CoV-2 S glycoproteins (e.g., a SARS CoV-2 S glycoprotein having the amino acid sequence of SEQ ID NO: 87 and a SARS CoV-2 S glycoprotein having the amino acid sequence of SEQ ID NO: 132). In embodiments, the initial dose comprises a SARS-CoV-2 S glycoprotein, a plasmid DNA encoding a SARS-Cov-2 S glycoprotein, an viral vector encoding a SARS-CoV-2 Spike glycoprotein, or an inactivated SARS-CoV-2 virus. In embodiments, the initial dose comprises a SARS-CoV-2 Spike glycoprotein, a plasmid DNA encoding a SARS-CoV-2 Spike glycoprotein, an viral vector encoding a SARS-Cov-2 Spike glycoprotein, or an inactivated SARS-CoV-2 virus, and the boost dose comprises one or more SARS-CoV-2 S glycoproteins.

[0341] In embodiments, the dose, as measured in μg, may be the total weight of the dose including the solute, or the weight of the CoV S polypeptide nanoparticles, or the weight of the CoV S polypeptide. Dose is measured using protein concentration assay either A²⁸⁰ or ELISA.

[0342] The dose of antigen, including for pediatric administration, may be in the range of about 5 μg to about 25 μg, about 1 μg to about 300 μg, about 90 μg to about 270 μg, about 100 μg to about 160 μg, about 110 μg to about 150 μg, about 120 μg to about 140 μg, or about 140 μg to about 160 μg. In embodiments, the dose is about 120 μg, administered with alum. In aspects, a pediatric dose may be in the range of about 1 μg to about 90 μg. In embodiments, the dose of CoV Spike (S) polypeptide is about 1 μg, about 2 μg, about 3 μg, about 4 μg, about 5 μg, about 6 μg, about 7 μg, about 8 μg, about 9 μg, about 10 μg, about 11 μg, about 12 μg, about 13 μg, about 14 μg, about 15 μg, about 16 μg, about 17 μg, about 18 μg, about 19 μg, about 20 μg, about 21, about 22, about 23, about 24, about 25 μg, about 26 μg, about 27 μg, about 28 μg, about 29 μg, about 30 μg, about 40 μg, about 50, about 60, about 70, about 80, about 90 about 100 μg, about 110 μg, about 120 μg , about 130 μg, about 140 μg, about 150 μg, about 160 μg, about 170 μg, about 180 μg, about 190 μg, about 200 μg, about 210 μg, about 220 μg, about 230 μg, about 240 μg, about 250 μg , about 260 μg, about 270 μg, about 280 μg, about 290 μg, or about 300 μg, including all values and ranges in between. In embodiments, the dose of CoV S polypeptide is 5 μg. In embodiments, the dose of CoV S polypeptide is 25 μg. In embodiments, the dose of a CoV S polypeptide is the same for the initial dose and for boost doses. In embodiments, the dose of a CoV S polypeptide is the different for the initial dose and for boost doses.

[0343] Certain populations may be administered with or without adjuvants. In certain aspects, compositions may be free of added adjuvant. In such circumstances, the dose may be increased by about 10%.

[0344] In embodiments, the dose of the adjuvant administered with a non-naturally occurring CoV S polypeptide is from about 1 μg to about 100 μg, for example, about 1 μg, about 2 μg, about 3 μg, about 4 μg, about 5 μg, about 6 μg, about 7 μg, about 8 μg, about 9 μg, about 10 μg, about 11 μg, about 12 μg, about 13 μg, about 14 μg, about 15 μg, about 16 μg, about 17 μg, about 18 μg, about 19 μg, about 20 μg, about 21, about 22, about 23, about 24, about 25 μg, about 26 μg, about 27 μg, about 28 μg, about 29 μg, about 30 μg, about 31 μg, about 32 μg, about 33 μg, about 34 μg, about 35 μg, about 36 μg, about 37 μg, about 38 μg, about 39 μg, about 40 μg, about 41 μg, about 42 μg, about 43 μg, about 44 μg, about 45 μg, about 46 μg, about 47 μg, about 48 μg, about 49 μg, about 50 μg, about 51 μg, about 52 μg, about 53 μg, about 54 μg, about 55 μg, about 56 μg, about 57 μg, about 58 μg, about 59 μg, about 60 μg, about 61 μg, about 62 μg, about 63 μg, about 64 μg, about 65 μg, about 66 μg, about 67 μg, about 68 μg, about 69 μg, about 70 μg, about 71 μg, about 72 μg, about 73 μg, about 74 μg, about 75 μg, about 76 μg. about 77 μg, about 78 μg, about 79 μg, about 80 μg, about 81 μg, about 82 μg, about 83 μg, about 84 μg, about 85 μg, about 86 μg, about 87 μg, about 88 μg, about 89 μg, about 90 μg, about 91 μg, about 92 μg, about 93 μg, about 94 μg, about 95 μg, about 96 μg, about 97 μg, about 98 μg, about 99 μg, or about 100 μg of adjuvant. In embodiments, the dose of adjuvant is about 50 μg. In embodiments, the adjuvant is a saponin adjuvant, e.g., MATRIX-M™.

[0345] In embodiments, the dose is administered in a volume of about 0.1 mL to about 1.5 mL, for example, about 0.1 mL, about 0.2 mL, about 0.25 mL, about 0.3 mL, about 0.4 mL, about 0.5 mL, about 0.6 mL, about 0.7 mL, about 0.8 mL, about 0.9 mL, about 1.0 mL, about 1.1 mL, about 1.2 mL, about 1.3 mL, about 1.4 mL, or about 1.5 mL. In embodiments, the dose is administered in a volume of 0.25 mL. In embodiments, the dose is administered in a volume of 0.5 mL. In embodiments, the dose is administered in a volume of 0.6 mL.

[0346] In particular embodiments for a vaccine against MERS, SARS, or the SARS-CoV-2 coronavirus, the dose may comprise a CoV S polypeptide concentration of about 1 μg/mL to about 50 μg/mL, 10 μg/mL, to about 100 μg/mL, about 10 μg/mL to about 50 μg/mL, about 175 μg/mL to about 325 μg/mL, about 200 μg/mL to about 300 μg/mL, about 220 μg/mL to about 280 μg/mL, or about 240 μg/mL to about 260 μg/mL.

[0347] In another embodiment, the disclosure provides a method of formulating a vaccine composition that induces immunity to an infection or at least one disease symptom thereof to a mammal, comprising adding to the composition an effective dose of a nanoparticle or a CoV S polypeptide. The disclosed CoV S polypeptides and nanoparticles are useful for preparing compositions that stimulate an immune response that confers immunity or substantial immunity to infectious agents. Thus, in one embodiment, the disclosure provides a method of inducing immunity to infections or at least one disease symptom thereof in a subject, comprising administering at least one effective dose of a nanoparticle and/or a CoV S polypeptide.

[0348] In embodiments, the CoV S polypeptides or nanoparticles comprising the same are administered in combination with an additional immunogenic composition. In embodiments, the additional immunogenic composition induces an immune response against SARS-CoV-2. In embodiments, the additional immunogenic composition is administered within about 1 minute, about 5 minutes, about 10 minutes, about 20 minutes, about 30 minutes, about 40 minutes, about 50 minutes, about 1 hour, about 2 hours, about 3 hours, about 4 hours, about 5 hours, about 6 hours, about 7 hours, about 8 hours, about 9 hours, about 10 hours, about 11 hours, about 12 hours, about 13 hours, about 14 hours, about 15 hours, about 16 hours, about 17 hours, about 18 hours, about 19 hours, about 20 hours, about 21 hours, about 22 hours, about 23 hours, about 1 day, about 2 days, about 3 days, about 4 days, about 5 days, about 6 days, about 7 days, about 8 days, about 9 days, about 10 days, about 11 days, about 12 days, about 13 days, about 14 days, about 15 days, about 16 days, about 17 days, about 18 days, about 19 days, about 20 days, about 21 days, about 22 days, about 23 days, about 24 days, about 25 days, about 26 days, about 27 days, about 28 days, about 29 days, about 30 days, or about 31 days of the disclosed CoV S polypeptides or nanoparticles comprising the same. In embodiments, the additional composition is administered with a first dose of a composition comprising a CoV S polypeptide or nanoparticle comprising the same. In embodiments, the additional composition is administered with a boost dose of a composition comprising a CoV S polypeptide or nanoparticle comprising the same.

[0349] In embodiments, the additional immunogenic composition comprises an mRNA encoding a SARS-Cov-2 Spike glycoprotein, a plasmid DNA encoding a SARS-Cov-2 Spike glycoprotein, an viral vector encoding a SARS-Cov-2 Spike glycoprotein, or an inactivated SARS-CoV-2 virus.

[0350] In embodiments, the additional immunogenic composition comprises mRNA that encodes for a CoV S polypeptide. In embodiments, the mRNA encodes for a CoV S polypeptide comprising proline substitutions at positions 986 and 987 of SEQ ID NO: 1. In embodiments, the mRNA encodes for a CoV S polypeptide comprising an intact furin cleavage site. In embodiments, the mRNA encodes for a CoV S polypeptide comprising proline substitutions at positions 986 and 987 of SEQ NO: 1 and an intact furin cleavage site. In embodiments, the mRNA encodes for a CoV S polypeptide comprising proline substitutions at positions 986 and 987 of SEQ ID NO: 1 and an inactive furin cleavage site. In embodiments, the mRNA encodes for a CoV S polypeptide having an amino acid sequence of SEQ ID NO: 87. In embodiments, the mRNA encoding for a CoV S polypeptide is encapsulated in a lipid nanoparticle. An exemplary immunogenic composition comprising mRNA that encodes for a CoV S polypeptide is described in Jackson et al. N. Eng. J. Med. 2020. An mRNA Vaccine against SARS-CoV-2-preliminary report, which is incorporated by reference in its entirety herein. In embodiments, the composition comprising mRNA that encodes for a CoV S polypeptide is administered at a dose of 25 μg, 100 μg, or 250 μg.

[0351] In embodiments, the additional immunogenic composition comprises an adenovirus vector encoding for a CoV S polypeptide. In embodiments, the AAV vector encodes for a wild-type CoV S polypeptide. In embodiments, the AAV vector encodes for a CoV S polypeptide comprising proline substitutions at positions 986 and 987 of SEQ ID NO: 1 and an intact furin cleavage site. In embodiments, the AAV vector encodes for a CoV S polypeptide comprising proline substitutions at positions 986 and 987 of SEQ ID NO: 1 and an inactive furin cleavage site. In embodiments, the AAV vector encodes for a CoV S polypeptide having an amino acid sequence of SEQ ID NO: 87. The following publications describe immunogenic compositions comprising an adenovirus vector encoding for a CoV S polypeptide, each of which is incorporated by, reference in its entirety herein: van Doremalen N. et al. A single dose of ChAdOx1 MERS provides protective immunity in rhesus macaques. Science Advances, 2020; van Doremalen N. et al. ChAdOx1 nCoV-19 vaccination prevents SARS-CoV-2 pneumonia in rhesus macaques. bioRxiv, (2020).

[0352] In embodiments, the additional immunogenic composition comprises deoxyribonucleic acid (DNA). In embodiments, the additional immunogenic composition comprises plasmid DNA. In embodiments, the plasmid DNA encodes for a CoV S polypeptide. In embodiments, the DNA encodes for a CoV S polypeptide comprising proline substitutions at positions 986 and 987 of SEQ ID NO: 1 and an intact furin cleavage site. In embodiments, the DNA encodes for a CoV S polypeptide comprising proline substitutions at positions 986 and 987 of SEQ ID NO: 1 and an inactive furin cleavage site. In embodiments, the DNA encodes for a CoV S polypeptide having an amino acid sequence of SEQ ID NO: 87.

[0353] In embodiments, the additional immunogenic composition comprises an inactivated virus vaccine.

[0354] In embodiments, the CoV S polypeptides or nanoparticles comprising CoV S polypeptides are administered to a patient that has or has previously had a confirmed infection caused by SARS-CoV-2 or a heterogeneous SARS-CoV-2 strain. The infection with SARS-CoV-2 or a heterogeneous SARS-CoV-2 strain may be confirmed by a nucleic acid amplification test (e.g., polymerase chain reaction) or serological testing (e.g., testing for antibodies against a SARS-CoV-2 viral antigen), In embodiments, the CoV S polypeptides or nanoparticles comprising CoV S polypeptides are administered to a patient at least about 3 days, at least about 1 week, at least about 2 weeks, at least about 3 weeks, at least about 4 weeks after a patient has been diagnosed with COVID-19. In embodiments, the CoV S polypeptides or nanoparticles comprising CoV S polypeptides are administered to a patient between 1 week and 1 year after the patient's diagnosis with COVID-19, for example, about 1 week, about 2 weeks, about 3 weeks, about 4 weeks, about 5 weeks, about 6 weeks, about 1 month, about 2 months, about 3 months, about 4 months, about 5 months, about 6 months, about 7 months, about 8 months, about 9 months, about 10 months, about 11 months, or about 1 year. In embodiments, the CoV S polypeptides or nanoparticles comprising CoV S polypeptides are administered to a patient between 1 week and 20 years after the patient's diagnosis with COVID-19, for example, about 1 week, about 2 weeks, about 3 weeks, about 4 weeks, about 5 weeks, about 6 weeks, about 1 month, about 2 months, about 3 months, about 4 months, about 5 months, about 6 months, about 7 months, about 8 months, about 9 months, about 10 months, about 11 months, about 1 year, about 2 years, about 3 years, about 4 years, about 5 years, about 6 years, about 7 years, about 8 years, about 9 years, about 10 years, about 11 years, about 12 years, about 13 years, about 14 years, about 15 years, about 16 years, about 17 years, about 18 years, about 19 years, or about 20 years.

[0355] In embodiments, the CoV S polypeptides or nanoparticles comprising the same are administered after the patient has been administered a first immunogenic composition. Non-limiting examples of first immunogenic compositions include a SARS-CoV-2 Spike glycoprotein, an mRNA encoding a SARS-Cov-2 Spike glycoprotein, a plasmid DNA encoding a SARS-Cov-2 Spike glycoprotein, an viral vector encoding a SARS-Cov-2 Spike glycoprotein, or an inactivated SARS-CoV-2 virus. In embodiments, the CoV S polypeptides or nanoparticles comprising the same are administered between about 1 week and about 1 year, between about 1 week and 1 month, between about 3 weeks and 4 weeks, between about 1 week and 5 years, between about 1 year and about 5 years, between about 1 year and about 3 years, between about 3 years and about 5 years, between about 5 years and about 10 years, between about 1 year and about 10 years, or between about 1 year and about 2 years after administration of the first immunogenic composition. In embodiments, the CoV S polypeptides or nanoparticles comprising the same are administered between about 1 week and about 1 year after administration of the first immunogenic composition, for example, about 1 week, about 2 weeks, about 3 weeks, about 4 weeks, about 5 weeks, about 6 weeks, about 7 weeks, about 8 weeks, about 9 weeks, about 10 weeks, about 1 month, about 2 months, about 3 months, about 4 months, about 5 months, about 6 months, about 7 months, about 8 months, about 9 months, about 10 months, about 11 months, or about 1 year after administration of the first immunogenic composition.

[0356] In embodiments, the CoV S proteins or nanoparticles comprising CoV S proteins are useful for preparing immunogenic compositions to stimulate an immune response that confers immunity or substantial immunity to one or more of MERS, SARS, SARS-CoV-2, and a heterogeneous SARS-CoV-2 strain. Both mucosal and cellular immunity may contribute to immunity to infection and disease. Antibodies secreted locally in the upper respiratory tract are a major factor in resistance to natural infection. Secretory immunoglobulin A (sIgA) is involved in protection of the upper respiratory tract and serum IgG in protection of the lower respiratory tract. The immune response induced by an infection protects against reinfection with the same virus or an antigenically similar viral strain. The antibodies produced in a host after immunization with the nanoparticles disclosed herein can also be administered to others, thereby providing passive administration in the subject.

[0357] In embodiments, the CoV S proteins or nanoparticles comprising CoV S proteins induce cross-neutralizing antibodies against SARS-CoV-2 viruses containing S proteins with one or more modifications selected from:

[0358] (a) deletion of one or more amino acids of the NTD, wherein the one or more amino acids are selected from the group consisting of amino acid 56, 57, 131, 132, 229, 230, 231, or combinations thereof; and

[0359] (b) mutation of one or more amino acids of the NTD, wherein the one or more mutations are selected from the group consisting of amino acid 67, 82, 133, 229, 202, 209, 240, 139, 5, 233, 7, 13, 125, 177, or combinations thereof;

[0360] (c) mutation of one or more amino acids of the RBD wherein the one or more mutations is selected from the group consisting of amino acid 488, 404, 471, 464, 439, 481, 426, 440, and combinations thereof;

[0361] (d) mutation to one or more amino acids of the SD1/2 , wherein the one or more amino acids is selected from the group consisting of 601, 557, 668, 642, and combinations thereof;

[0362] (e) an inactive furin cleavage site (corresponding to one or more mutations in amino acids 669-672);

[0363] (f) deletion of one or more amino acids of the S2 subunit, wherein the amino acids are selected from the group consisting of 676-702, 702-711, 775-793, 806-815; and combinations thereof

[0364] (g) mutation of one or more amino acids of the S2 subunit, wherein the amino acids are selected from the group consisting of 973, 974, 703, 1105. 688, 969, 1014, and 1163; and combinations thereof

[0365] (h) deletion of one or more amino acids from the TMCT (amino acids 1201-1260), wherein the amino acids of the CoV S glycoprotein are numbered with respect to SEQ ID NO: 2.

[0366] In embodiments, the CoV S proteins or nanoparticles comprising CoV S proteins induce cross-neutralizing antibodies against SARS-CoV-2 viruses containing S proteins with one or more modifications selected from: deletions of amino acid 56, deletion of amino acid 57, deletion of amino acid 131, N488Y, A557D, D601G, P668H, T703I, S969A, D1105H, N426K, and Y440F, wherein the amino acids are numbered with respect to a CoV S polypeptide having an amino acid sequence of SEQ ID NO: 2.

[0367] In embodiments, the CoV S protein or nanoparticle comprising a CoV S protein induces cross-neutralizing antibodies against SARS-CoV-2 viruses containing S proteins with one or more modifications selected from: deletions of amino acid 56, deletion of amino acid 57, deletion of amino acid 131, N488Y, A557D, D601G, P668H, T703I, S969A, and D1105H, wherein the amino acids are numbered with respect to a CoV S polypeptide having an amino acid sequence of SEQ ID NO: 2.

[0368] In embodiments, the CoV S protein or nanoparticle comprising a CoV S protein induces cross-neutralizing antibodies against SARS-CoV-2 viruses containing S proteins with one or more modifications selected from: D67A, D202G, L229H, K404N, E471K, N488Y, D601G, and A688V, wherein the amino acids are numbered with respect to a CoV S polypeptide having an amino acid sequence of SEQ ID NO: 2.

[0369] In embodiments, the CoV S protein or nanoparticle comprising a CoV S protein induces cross-neutralizing antibodies against SARS-CoV-2 viruses containing S proteins with one or more modifications selected from: deletion of amino acids 229-231, D67A, D202G, K404N, E471K, N488Y, D601G, and A688V, wherein the amino acids are numbered with respect to a CoV S polypeptide having an amino acid sequence of SEQ ID NO: 2.

[0370] In embodiments, the CoV S protein or nanoparticle comprising a CoV S protein induces cross-neutralizing antibodies against SARS-CoV-2 viruses containing S proteins with one or more modifications selected from: deletion of amino acids 229-231, L5F, D67A, D202G, K404N, E471K, N488Y, D601G, and A688V wherein the amino acids are numbered with respect to a CoV S polypeptide having an amino acid sequence of SEQ ID NO: 2.

[0371] In embodiments, the CoV S protein or nanoparticle comprising a CoV S protein induces cross-neutralizing antibodies against SARS-CoV-2 viruses containing S proteins with one or more modifications selected from: L5F, T7N, P13S, D125Y, R177S, K404T, E471K, N488Y, D601G, H642Y, T1014I, and V1163F, wherein the amino acids are numbered with respect to a CoV S polypeptide having an amino acid sequence of SEQ ID NO: 2.

[0372] In embodiments, the CoV S protein or nanoparticle comprising a CoV S protein induces cross-neutralizing antibodies against SARS-CoV-2 viruses with an S protein comprising one or more modifications selected from: W139C and L439R, wherein the amino acids are numbered with respect to a CoV S polypeptide having an amino acid sequence of SEQ ID NO: 2. In embodiments, the CoV S protein comprising W139C and L439R modifications is expressed with a signal peptide having an amino acid sequence of SEQ ID NO: 117 or SEQ ID NO: 5. In embodiments, the CoV S protein or nanoparticle comprising a CoV S protein induces cross-neutralizing antibodies against SARS-CoV-2 viruses with one or more modifications selected from: D601G, W139C, and L439R, wherein the amino acids are numbered with respect to a CoV S polypeptide having an amino acid sequence of SEQ ID NO: 2. In embodiments, the CoV S protein or nanoparticle comprising D601G, W139C, and L439R modifications is expressed with a signal peptide having an amino acid sequence of SEQ ID NO: 117 or SEQ ID NO: 5.

[0373] In embodiments, the CoV S protein or nanoparticle comprising a CoV S protein induces cross-neutralizing antibodies against SARS-CoV-2 viruses with one or more modifications selected from: D601G, L5F, D67A, D202G, deletions of amino acids 229-231, R233I, K404N, E471K, N488Y, and A688V, wherein the amino acids are numbered with respect to a CoV S polypeptide having an amino acid sequence of SEQ ID NO: 2. In embodiments, the CoV S protein or nanoparticle comprising a CoV S protein induces cross-neutralizing antibodies against SARS-CoV-2 viruses with one or more modifications selected from: L5F, D67A, D202G, deletions of amino acids 229-231, R233I, K404N, E471K, N488Y, and A688V, wherein the amino acids are numbered with respect to a CoV S polypeptide having an amino acid sequence of SEQ ID NO: 2.

[0374] In embodiments, the present disclosure provides a method of producing one or more of high affinity anti-MERS-CoV, anti-SARS-CoV, and anti-SARS-CoV-2 virus antibodies. The high affinity antibodies produced by immunization with the nanoparticles disclosed herein are produced by administering an immunogenic composition comprising an S CoV polypeptide or a nanoparticle comprising an S CoV polypeptide to an animal, collecting the serum and/or plasma from the animal, and purifying the antibody from the serum and/or plasma. In one embodiment, the animal is a human. In embodiments, the animal is a chicken, mouse, guinea pig, rat, rabbit, goat, human, horse, sheep, or cow. In one embodiment, the animal is bovine or equine. In another embodiment, the bovine or equine animal is transgenic. In yet a further embodiment, the transgenic bovine or equine animal produces human antibodies. In embodiments, the animal produces monoclonal antibodies. In embodiments, the animal produces polyclonal antibodies. In one embodiment, the method further comprises administration of an adjuvant or immune stimulating compound. In a further embodiment, the purified high affinity antibody is administered to a human subject. In one embodiment, the human subject is at risk for infection with one or more of MERS, SARS, and SARS-CoV-2.

[0375] In embodiments, the CoV S proteins or nanoparticles are co-administered with an influenza glycoprotein or nanoparticle comprising an influenza glycoprotein. Suitable glycoproteins and nanoparticles are described in US Publication No. 2018/0133308 and US Publication No. 2019/0314487, each of which is incorporated by reference herein in its entirety. In embodiments, the CoV S protein or nanoparticle is coadministered with: (a) a detergent-core nanoparticle, wherein the detergent-core nanoparticle comprises a recombinant influenza hemagglutinin (HA) glycoprotein from a Type B influenza strain; and (b) a Hemagglutinin Saponin Matrix Nanoparticle (HaSMaN), wherein the HaSMaN comprises a recombinant influenza HA glycoprotein from a Type A influenza strain and ISCOM matrix adjuvant. In embodiments, the CoV S protein or nanoparticle is coadministered with a nanoparticle comprising a non-ionic detergent core and an influenza HA glycoprotein, wherein the influenza HA glycoprotein contains a head region that projects outward from the non-ionic detergent core and a transmembrane domain that is associated with the non-ionic detergent core, wherein the influenza HA glycoprotein is a HA0 glycoprotein, wherein the amino acid sequence of the influenza HA glycoprotein has 100% identity to the amino acid sequence of the native influenza HA protein. In embodiments, the influenza glycoprotein or nanoparticle is coformulated with the CoV S protein or nanoparticle.

[0376] All patents, patent applications, references, and journal articles cited in this disclosure are expressly incorporated herein by reference in their entireties for all purposes.

### EXAMPLES

### Example 1

### Expression and Purification of Coronavirus Spike (S) Polypeptide Nanoparticles

[0377] The native coronavirus Spike (S) polypeptide (SEQ ID NO: 1 and SEQ ID NO:2) and CoV Spike polypeptides which have amino acid sequences corresponding to SEQ ID NOS: 3, 4, 38, 41, 44, 48, 51, 54, 58, 61, 63, 65, 67, 73, 75, 78. 79, 82, 83, 85, 87, 106, 108, 89, 112-115, 132, 133, 114, 138, 141, 144, 147, 151, 153, 156, 158, 164-168 have been expressed in a baculovirus expression system and recombinant plaques expressing the coronavirus Spike (S) polypeptides were picked and confirmed. In each case the signal peptide is SEQ ID NO: 5. FIG. 4 and FIG. 9 show successful purification of the CoV Spike polypeptides BV2364, BV2365, BV2366, BV2367, BV2368, BV2369, BV2373, BV2374, and BV2375. Table 2 shows the sequence characteristics of the aforementioned CoV Spike polypeptides.

TABLE 2
Selected CoV Spike Polypeptides

| CoV S polypeptide | Modification | SEQ ID NO. |
|---|---|---|
| BV2364 | Deleted N-Terminal Domain | 48 |
| BV2365 | Inactive furin cleavage site | 4 |
| BV2361/BV2366 | Wild-type | 2 |
| BV2367 | Deletion of amino acids 676-685, | 63 |
| | inactive furin cleavage site | |
| BV2368 | Deletion of amino acids 702-711, | 65 |
| | inactive furin cleavage site | |
| BV2369 | Deletion of amino acids 806-815, | 67 |
| | inactive furin cleavage site | |
| BV2373, formulated | Inactive furin cleavage site, | 87 |
| into a composition | K973P mutation, V974P mutation | |
| referred to herein as | | |
| “NVX-CoV2373” | | |
| BV2374 | K973P mutation, V974P mutation | 85 |
| BV2374 | Inactive furin cleavage site and | 58 |
| | His-tag | |
| BV2384 | Inactive furin cleavage site | 110 |
| | (GSAS), K973P, V974P mutation | |
| BV2425 | Inactive furin cleavage site, | 114 |
| | K973P, V974P mutation, deletions | |
| | of amino acid 56, deletion of | |
| | amino acid 57, deletion of amino | |
| | acid 131, N488Y mutation, | |
| | A557D mutation, D601G | |
| | mutation, P668H mutation, T703I | |
| | mutation, S969A mutation, and | |
| | D1105H mutation | |
| BV2426 | Inactive furin cleavage site, | 115 |
| | K973P mutation, V974P mutation, | |
| | D67A mutation, D202G mutation, | |
| | L229H mutation, K404N | |
| | mutation, E471K mutation, | |
| | N488Y mutation, D601G | |
| | mutation, and A688V mutation | |
| BV2438 | Inactive furin cleavage site | 132 |
| | (QQAQ: SEQ ID NO: 7), K973P | |
| | mutation, V974P mutation, | |
| | K404N mutation, E471K | |
| | mutation, N488Y mutation, D67A | |
| | mutation, D202G mutation, | |
| | L229H mutation, D601G | |
| | mutation, A688V mutation | |
| BV2423 | Inactive furin cleavage site (GG), | 133 |
| | K973P mutation, V974P mutation, | |
| | D601G mutation | |
| BV2425 | Inactive furin cleavage site | 114 |
| | (QQAQ: SEQ ID NO: 7), K973P | |
| | mutation, V974P mutation, | |
| | deletion of amino acids 56, 57, and | |
| | 131, N488Y mutation, A557D | |
| | mutation, D601G mutation, | |
| | P668H mutation, T703I mutation, | |
| | S969A mutation, D1105H | |
| | mutation | |
| BV2425-2 | Inactive furin cleavage site (GG), | 138 |
| | K973P mutation, V974P mutation, | |
| | deletion of amino acids 56, 57, and | |
| | 131, N488Y mutation, A557D | |
| | mutation, D601G mutation, | |
| | P668H mutation, T703I mutation, | |
| | S969A mutation, D1105H | |
| | mutation | |
| BV2439 | Inactive furin cleavage site (GG), | 141 |
| | K973P mutation, V974P mutation, | |
| | K404N mutation, E471K | |
| | mutation, N488K mutation, D67A | |
| | mutation, D202G mutation, | |
| | L229H mutation, D601G | |
| | mutation, A688V mutation | |
| BV2441 | Inactive form cleavage site | 144 |
| | (QQAQ: SEQ ID NO: 7), K973P | |
| | mutation, V974P mutation, | |
| | K404N mutation, E471K | |
| | mutation, N488Y mutation, D67A | |
| | mutation, D202G mutation, | |
| | D601G mutation, A688V | |
| | mutation, deletions of amino acids | |
| | 229-231 | |
| BV2442 | Inactive furin cleavage site (GG), | 147 |
| | K973P mutation, V974P mutation, | |
| | K404N mutation, E471K | |
| | mutation, N488Y mutation, D67A | |
| | mutation, D202G mutation, | |
| | D601G mutation, A688V | |
| | mutation, deletions of amino acids | |
| | 229-231 | |
| BV2443 | Inactive form cleavage site | 151 |
| | (QQAQ: SEQ ID NO: 7), K973P | |
| | mutation, V974P mutation, T7N | |
| | mutation, P13S mutation, D125Y | |
| | mutation, R177S mutation, K404T | |
| | mutation, E471K mutation, | |
| | N488Y mutation, D601G | |
| | mutation, H642Y mutation, | |
| | T1014Y mutation, V1163F | |
| | mutation | |
| BV2448 | Inactive furin cleavage site | 153 |
| | (QQAQ: SEQ ID NO: 7), K973P | |
| | mutation, V974P mutation, | |
| | W139C mutation, S481P | |
| | mutation, D601G mutation, | |
| | L439R mutation | |
| BV1.526NY-1 | Inactive furin cleavage site | 156 |
| | (QQAQ: SEQ ID NO: 7), K973P | |
| | mutation, V974P mutation, T82I | |
| | mutation, D240G mutation, | |
| | E471K mutation, D601G | |
| | mutation, A688V mutation | |
| BV1.526NY-2 | Inactive form cleavage site | 158 |
| | (QQAQ: SEQ ID NO: 7), K973P | |
| | mutation, V974P mutation, T82I | |
| | mutation, D240G mutation, | |
| | E464K mutation, D601G | |
| | mutation, A688V mutation | |
| BV2465 | Mutations: T6R, G129D, R145G, | 164 |
| | L439R, T465K, D601G, P668R, | |
| | D937G, K973P, V974P, Inactive | |
| | Furin Cleavage site (QQAQ: SEQ | |
| | ID NO: 7) | |
| | Deletion: 143, 144 | |
| BV2457 | T82I, G129D, E141K, L439R, | 165 |
| | T471Q, D601G, P668R, Q1058H, | |
| | K973P, V974P, Inactive Furin | |
| | Cleavage site (QQAQ: SEQ ID | |
| | NO: 7) | |
| BV2472 | Mutations: T6R, G129D, R145G, | 166 |
| | K404N, L439R, T465K, D601G, | |
| | P668R, D937G, W245I, K973P, | |
| | V974P, Inactive Furin Cleavage | |
| | site (QQAQ: SEQ ID NO: 7) | |
| | Deletion: 143, 144 | |
| BV2480 | T82I, Y131S, Y132N, R333K, | 167 |
| | E471K, N488Y, D601G, P668H, | |
| | D937N, Inactive Furin Cleavage | |
| | site (QQAQ: SEQ ID NO: 7), | |
| | K973P mutation, V974P mutation | |
| BV2481 | T82I, Y131T, Y132S, R333K, | 168 |
| | E471K, N488Y, D601G, P668H, | |
| | D937N, Inactive Furin Cleavage | |
| | site (QQAQ: SEQ ID NO: 7), | |
| | K973P mutation, V974P mutation | |
| | Insertion of asparagine after amino | |
| | acid 132 | |

[0378] The wild-type BV2361 protein (SEQ ID NO: 2) binds to human angiotensin-converting enzyme 2 precursor (hACE2). Bio-layer interferometry and ELISA were performed to assess binding of the CoV S polypeptides.

### Bio-Layer Interferometry (BLI)

[0379] The BLI experiments were performed using an Octet QK384 system (Pall Forté Bio, Fremont, Calif.). His-tagged human ACE2 (2 μg mL-1) was immobilized on nickel-charged Ni-NTA biosensor tips. After baseline, SARS-CoV-2 S protein containing samples were 2-fold serially diluted and were allowed to associate for 600 seconds followed by dissociation for an additional 900 sec. Data was analyzed with Octet software HT 101:1 global curve fit.

[0380] The CoV S polypeptides BV2361, BV2365, BV2369, BV2365, BV2373, BV2374 retain the ability to bind to hACE2 (FIG. 5, FIGS. 11A-C). Dissociation kinetics showed that the S-proteins remained tightly bound as evident by minimal or no dissociation over 900 seconds of observation in the absence of fluid phase S protein (FIGS. 11A-C).

[0381] Furthermore, binding is specific. The wild-type CoV S protein, BV2361 and the CoV S polypeptides BV2365 and BV2373 do not bind the MERS-CoV receptor, dipeptidyl peptidase IV (DPP4). Additionally, the MERS S protein does not bind to human angiotensin-converting enzyme 2 precursor (hACE2) (FIG. 6 and FIGS. 11D-F).

### ELISA

[0382] The specificity of the CoV S polypeptides for hACE2 was confirmed by ELISA. Ninety-six well plates were coated with 100 μL SARS-CoV-2 spike protein (2 μg/mL) overnight at 4° C. Plates were washed with phosphate buffered saline with 0.05% Tween (PBS-T) buffer and blocked with TBS Startblock blocking buffer (ThermoFisher, Scientific). His-tagged hACE2 and hDPP4 receptors were 3-fold serially diluted (5-0.0001 μg mL-1) and added to coated wells for 2 hours at room temperature. The plates were washed with PBS-T. Optimally diluted horseradish peroxidase (HRP) conjugated anti-histidine was added and color developed by addition of and 3,3′,5,5′-tetramethylbenzidine peroxidase substrate (TMB, T0440-IL, Sigma, St. Louis, Mo., USA). Plates were read at an OD of 450 nm with a SpectraMax Plus plate reader (Molecular Devices, Sunnyvale, Calif., USA) and data analyzed with SoftMax software. EC50 values were calculated by 4-parameter fitting using GraphPad Prism 7.05 software.

[0383] The ELISA results showed that the wild-type CoV S polypeptide (BV2361), BV2365, and BV2373 proteins specifically bound hACE2 but failed to bind the hDPP-4 receptor used by MERS-CoV (IC₅₀>5000 ng mL-1). The wild-type CoV S polypeptide and BV2365 bound to hACE2 with similar affinity (IC₅₀=36-38 ng/mL), while BV2373 attained 50% saturation of hACE2 binding at 2-fold lower concentration (IC₅₀=18 ng/mL) (FIG. 7, FIGS. 11D-F).

### Protein and Nanoparticle Production

[0384] The recombinant virus is amplified by infection of Sf9 insect cells. A culture of insect cells is infected at ˜3 MOI (Multiplicity of infection=virus ffu or pfu/cell) with baculovirus. The culture and supernatant is harvested 48-72 hrs post-infection. The crude cell harvest, approximately 30 mL, is clarified by centrifugation for 15 minutes at approximately 800×g. The resulting crude cell harvests containing the coronavirus Spike (S) protein are purified as nanoparticles as described below.

[0385] To produce nanoparticles, non-ionic surfactant TERGITOL® nonylphenol ethoxylate NP-9 is used in the membrane protein extraction protocol. Crude extraction is further purified by passing through anion exchange chromatography, lentil lectin affinity/HIC and cation exchange chromatography. The washed cells are lysed by detergent treatment and then subjected to low pH treatment which leads to precipitation of BV and Sf9 host cell DNA and protein. The neutralized low pH treatment lysate is clarified and further purified on anion exchange and affinity chromatography before a second low pH treatment is performed.

[0386] Affinity chromatography is used to remove Sf9/BV proteins, DNA and NP-9, as well as to concentrate the coronavirus Spike (S) protein. Briefly, lentil lectin is a metalloprotein containing calcium and manganese, which reversibly binds polysaccharides and glycosylated proteins containing glucose or mannose. The coronavirus Spike (S) protein-containing anion exchange flow through fraction is loaded onto the lentil lectin affinity chromatography resin (Capto Lentil Lectin, GE Healthcare). The glycosylated coronavirus Spike (S) protein is selectively bound to the resin while non-glycosylated proteins and DNA are removed in the column flow through. Weakly bound glycoproteins are removed by buffers containing high salt and low molar concentration of methyl alpha-D-mannopyranoside (MMP).

[0387] The column washes are also used to detergent exchange the NP-9 detergent with the surfactant polysorbate 80 (PS80). The coronavirus Spike (S) polypeptides are eluted in nanoparticle structure from the lentil lectin column with a high concentration of MMP. After elution, the coronavirus Spike (S) protein trimers are assembled into nanoparticles composed of coronavirus Spike (S) protein trimers and PS80 contained in a detergent core.

### Example 2

### Immunogenicity of Coronavirus Spike (S) Polypeptide Nanoparticle Vaccines in Mice

[0388] The coronavirus Spike (S) protein composition comprising a CoV S polypeptide of SEQ ID NO: 87 (also called “BV2373”) as described in Example 1 was evaluated for immunogenicity and toxicity in a murine model, using female BALB/c mice (7-9 weeks old; Harlan Laboratories Inc., Frederick, Md.). The compositions were evaluated in the presence and in the absence of a saponin adjuvant, e.g., MATRIX-M™. Compositions containing MATRIX-M™ contained 5 μg of MATRIX-M™. Vaccines containing coronavirus Spike (S) polypeptide at various doses, including 0.01 μg, 0.1 μg, 1 μg, and 10 μg, were administered intramuscularly as a single dose (also referred to as a single priming dose) (study day 14) or as two doses (also referred to as a prime/boost regimen) spaced 14-days apart (study day 0 and 14). A placebo group served as a non-immunized control. Serum was collected for analysis on study days −1, 13, 21, and 28. Vaccinated and control animals were intranasally challenged with SARS-CoV-2 42 days following one (a single dose) or two (two doses) immunizations.

### Vaccine Immunogenicity

[0389] Animals immunized with a single priming dose of 0.1-10 μg BV2373 and MATRIX-M™ had elevated anti-S IgG titers that were detected 21-28 days after a single immunization (FIG. 13B). Mice immunized with a 10 μg dose of BV2373 and MATRIX-M™ produced antibodies that blocked hACE2 receptor binding to the CoV S protein and virus neutralizing antibodies that were detected 21-28 days after a single priming dose (FIG. 14 and FIG. 15). Animals immunized with the prime/boost regimen (two doses) had significantly elevated anti-S IgG titers that were detected 7-16 days following the booster immunization across all dose levels (FIG. 13A). Animals immunized with BV2373 (1 μg and 10 μg) and MATRIX-M™ had similar high anti-S IgG titers following immunization (GMT=139,000 and 84,000, respectively). Mice immunized with BV2373 (0.1 μg, 1 μg, or 10 μg) and MATRIX-M™ had significantly (p≤0.05 and p≤0.0001) higher anti-S IgG titers compared to mice immunized with 10 μg BV2373 without adjuvant (FIG. 13A). These results indicate the potential for 10- to 100-fold dose sparing provided by the MATRIX-M™ adjuvant. Furthermore, immunization with two doses of BV2373 and MATRIX-M™ elicited high titer antibodies that blocked hACE2 receptor binding to S-protein (IC50=218-1642) and neutralized the cytopathic effect (CPE) of SARS-CoV-2 on Vero E6 cells (100% blocking of CPE=7680-20,000) across all dose levels (FIG. 14 and FIG. 15).

### SARS CoV-2 Challenge

[0390] To evaluate the induction of protective immunity, immunized mice were challenged with SARS-CoV-2. Since mice do not support replication of the wild-type SARS-CoV-2 virus, on day 52 post initial vaccination, mice were intranasally infected with an adenovirus expressing hACE2 (Ad/hACE2) to render them permissive. Mice were intranasally inoculated with 1.5×10⁵ pfu of SARS-CoV-2 in 50 μL divided between nares. Challenged mice were weighed on the day of infection and daily for up to 7 days post infection. At 4- and 7-days post infection, 5 mice were sacrificed from each vaccination and control group, and lungs were harvested and prepared for pulmonary histology.

[0391] The viral titer was quantified by a plaque assay. Briefly, the harvested lungs were homogenized in PBS using 1.0 mm glass beads (Sigma Aldrich) and a Beadruptor (Omini International Inc.). Homogenates were added to Vero E6 near confluent cultures and SARS-CoV-2 virus titers determined by counting plaque forming units (pfu) using a 6-point dilution curve

[0392] At 4 days post infection, placebo-treated mice had 10⁴ SARS-CoV-2 pfu/lung, while the mice immunized with BV2363 without MATRIX-M™ had 10³ pfu/lung (FIG. 16). The BV2373 with MATRIX-M™ prime-only groups of mice exhibited a dose dependent reduction in virus titer, with recipients of the 10 μg BV2373 dose having no detectable virus at day 4 post infection. Mice receiving 1 μg, 0.1 μg and 0.01 μg BV2373 doses all showed a marked reduction in titer compared to placebo-vaccinated mice. In the prime/boost groups, mice immunized with 10 μg, 1 μg and 0.1 μg doses had almost undetectable lung virus loads, while the 0.01 μg group displayed a reduction of 1 log reduction relative to placebo animals.

[0393] Weight loss paralleled the viral load findings. Animals receiving a single dose of BV2373 (0.1 μg, 1 μg, and 10 μg) and MATRIX-M™ showed marked protection from weight loss compared to the unvaccinated placebo animals (FIG. 17A). The mice receiving a prime and boost dose with adjuvant also demonstrated significant protection against weight loss at all dose levels (FIGS. 17B-C). The effect of the presence of adjuvant on protection against weight loss was evaluated. Mice receiving the prime/boost (two doses) plus adjuvant were significantly protected from weight loss relative to placebo, while the group immunized without adjuvant was not (FIG. 17C). These results showed that BV2373 confers protection against SAES-CoV-2 and that low doses of the vaccine associated with lower serologic responses do not exacerbate weight loss or demonstrate exaggerated illness.

[0394] Lung histopathology was evaluated on days 4 and day 7 post infection (FIG. 18A and FIG. 18B). At day 4 post infection, placebo-immunized mice showed denudation of epithelial cells in the large airways with thickening of the alveolar septa surrounded by a mixed inflammatory cell population. Periarteriolar cuffing was observed throughout the lungs with inflammatory cells consisting primarily of neutrophils and macrophages. By day 7 post infection, the placebo-treated mice displayed peribronchiolar inflammation with increased periarteriolar cuffing. The thickened alveolar septa remained with increased diffuse interstitial inflammation throughout the alveolar septa (FIG. 18B).

[0395] The BV2373 immunized mice showed significant reduction in lung pathology at both day 4 and day 7 post infection in a dose-dependent manner. The prime only group displays reduced inflammation at the 10 μg and 1 μg dose with a reduction in inflammation surrounding the bronchi and arterioles compared to placebo mice. In the lower doses of the prime-only groups, lung inflammation resembles that of the placebo groups, correlating with weight loss and lung virus titer. The prime/boost immunized groups displayed a significant reduction in lung inflammation for all doses tested, which again correlated with lung viral titer and weight loss data. The epithelial cells in the large and small bronchi at day 4 and 7 were substantially preserved with minimal bronchiolar sloughing and signs of viral infection. The arterioles of animals immunized with 10 μg, 1 μg and 0.1 μg doses have minimal inflammation with only moderate cuffing seen with the 0.01 μg dose, similar to placebo. Alveolar inflammation was reduced in animals that received the higher doses with only the lower 0.01 μg dose associated with inflammation (FIGS. 18A-18B). These data demonstrate that BV2373 reduces lung inflammation after challenge and that even doses and regimens of BV2373 that elicit minimal or no detectable neutralizing activity are not associated with exacerbation of the inflammatory response to the virus. Furthermore, the vaccine does not cause vaccine associated enhanced respiratory disease (VAERD) in challenged mice.

### T Cell Response

[0396] The effect of the vaccine composition comprising a CoV S polypeptide of SEQ ID NO: 87 on the T cell response was evaluated. BALB/c mice (N=6 per group) were immunized intramuscularly with 10 μg BV2373 with or without 5 μg MATRIX-M™ in 2 doses spaced 21-days apart. Spleens were collected 7-days after the second immunization (study day 28). A non-vaccinated group (N=3) served as a control.

[0397] Antigen-specific T cell responses were measured by ELISPOT™ enzyme linked immunosorbent assay and intracellular cytokine staining (ICCS) from spleens collected 7-days after the second immunization (study day 28). The number of IFN-γ secreting cells after ex vivo stimulation increased 20-fold (p=0.002) in spleens of mice immunized with BV2373 and MATRIX-M™ compared to BV2373 alone as measured by the ELISPOT™ assay (FIG. 19). In order to examine CD4+ and CD8+ T cell responses separately, ICCS assays were performed in combination with surface marker staining. Data shown are gated on CD44hi CD62L− effector memory T cell population. The frequency of IFN-γ+, TNF-α+, and IL-2+ cytokine-secreting CD4+ and CD8+ T cells was significantly higher (p<0.0001) in spleens from mice immunized with BV2373 as compared to mice immunized without adjuvant (FIG. 20A-C and FIG. 21A-C). Further, the frequency of multifunctional CD4+ and CD8+ T cells, which simultaneously produce at least two or three cytokines was also significantly increased (p<0.0001) in spleens from the BV2373/MATRIX-M™ immunized mice as compared to mice immunized in the absence of adjuvant (FIGS. 20D-E and FIGS. 21D-E). Immunization with BV2373/MATRIX-M™ resulted in higher proportions of multifunctional phenotypes (e.g., T cells that secrete more than one of IFN-γ, TNF-α, and IL-2) within both CD4+ and CD8+ T cell populations. The proportions of multifunctional phenotypes detected in memory CD4+ T cells were higher than those in CD8+ T cells (FIG. 22).

[0398] Type 2 cytokine IL-4 and IL-5 secretion from CD4+ T cells was also determined by ICCS and ELISPOT™ respectively. Immunization with BV2373/MATRIX-M™ also increased type 2 cytokine IL-4 and IL-5 secretion (2-fold) compared to immunization with BV2373 alone, but to a lesser degree than enhancement of type 1 cytokine production (e.g. IFN-γ increased 20-fold) (FIGS. 23A-C). These results indicate that administration of the MATRIX-M™ adjuvant skewed the CD4+ T cell development toward Th1 responses.

[0399] The effect of immunization on germinal center formation was assessed by measuring the frequency of CD4+ T follicular helper (TFH) cells and germinal center (GC) B cells in spleens. MATRIX-M™ administration significantly increased the frequency of TFH cells (CD4+ CXCR5+ PD-1+) was significantly increased (p=0.01), as well as the frequency of GC B cells (CD19+GL7+CD95+) (p=0.0002) in spleens (FIGS. 24A-B and FIGS. 25A-B).

### Example 3

### Immunogenicity of Coronavirus Spike (S) Polypeptide Nanoparticle Vaccines in Olive Baboons

[0400] The immunogenicity of a vaccine composition comprising BV2373 in baboons was assessed. Adult olive baboons were immunized with a dose range (1 μg, 5 μg and 25 μg) of BV2373 and 50 μg MATRIX-M™ adjuvant administered by intramuscular (IM) injection in two doses spaced 21-days apart. To assess the adjuvanting activity of MATRIX-M™ in non-human primates, another group of animals was immunized with 25 μg of BV2373 without MATRIX-M™. Anti-S protein IgG titers were detected within 21-days of a single priming immunization in animals immunized with BV2373/MATRIX-M™ across all the dose levels (GMT=1249-19,000). Anti-S protein IgG titers increased over a log (GMT=33,000-174,000) within 1 to 2 weeks following a booster immunization (days 28 and 35) across all of the dose levels. (FIG. 26A).

[0401] Low levels of hACE2 receptor blocking antibodies were detected in animals following a single immunization with BV2373 (5 μg or 25 μg) and MATRIX-M™ (GMT=22-37). Receptor blocking antibody titers were significantly increased within one to two weeks of the booster immunization across all groups immunized with BV2373/MATRIX-M™ (GMT=150-600) (FIG. 26B). Virus neutralizing antibodies were elevated (GMT=190-446) across all dose groups after a single immunization with BV2373/MATRIX-M™. Animals immunized with 25 μg BV2373 alone had no detectable antibodies that block S-protein binding to hACE2 (FIG. 26C). Neutralizing titers were increased 6- to 8-fold one week following the booster immunization (GMT=1160-3846). Neutralizing titers increased an additional 25- to 38-fold following the second immunization (GMT=6400-17,000) (FIG. 26C). There was a significant correlation (p<0.0001) between anti-S IgG levels and neutralizing antibody titers (FIG. 27). The immunogenicity of the adjuvanted vaccine in nonhuman primates is consistent with the results of Example 2 and further supports the role of MATRIX-M™ in promoting the generation of neutralizing antibodies and dose sparing.

[0402] PBMCs were collected 7 days after the second immunization (day 28), and the T cell response was measured by ELISPOT assay. PBMCs from animals immunized with BV2373 (5 μg or 25 μg) and MATRIX-M™ had the highest number of IFN-γ secreting cells, which was 5-fold greater compared to animals immunized with 25 μg BV2373 alone or BV2373 (1 μg) and MATRIX-M™ (FIG. 28). By ICCS analysis, immunization with BV2373 (5 μg) and MATRIX-M™ showed the highest frequency of IFN-γ+, IL-2+, and TNF-α+ CD4+ T cells (FIGS. 29A-C). This trend was also true for multifunctional CD4+ T cells, in which at least two or three type 1 cytokines were produced simultaneously (FIGS. 29D-E).

### Example 4

### Structural Characterization of Coronavirus Spike (S) Polypeptide Nanoparticle Vaccines

[0403] Transmission electron microscopy (TEM) and two dimensional (2D) class averaging were used to determine the ultrastructure of BV2373. High magnification (67,000× and 100,000×) TEM images of negatively stained BV2373 showed particles corresponding to S-protein homotrimers.

[0404] An automated picking protocol was used to construct 2D class average images (Lander G. C. et al. J Struct Biol. 166, 95-102 (2009); Sorzano C. O. et al., J Struct Biol. 148, 194-204 (2004).). Two rounds of 2D class averaging of homotrimeric structures revealed a triangular particle appearance with a 15 nm length and 13 nm width (FIG. 10, top left). Overlaying the recently solved cryoEM structure of the SARS-CoV-2 spike protein (EMD ID: 21374) over the 2D BV2373 image showed a good fit with the crown-shaped S1 (NTD and RBD) and the S2 stem (FIG. 10, bottom left). Also apparent in the 2D images was a faint projection that protruded from the tip of the trimeric structure opposite of the NTD/RBD crown (FIG. 10, top right). 2D class averaging using a larger box size showed these faint projections form a connection between the S-trimer and an amorphous structure. (FIG. 10, bottom right).

[0405] Dynamic light scattering (DLS) show that the wild-type CoV S protein had a Z-avg particle diameter of 69.53 nm compared to a 2-fold smaller particle size of BV2365 (33.4 nm) and BV2373 (27.2 nm). The polydispersity index (PDI) indicated that BV2365 and BV2373 particles were generally uniform in size, shape, and mass (PDI=0.25-0.29) compared to the wild-type spike-protein (PDI=0.46) (Table 3).

TABLE 3
Particle Size and Thermostability of
SARS-CoV-2 Trimeric Spike Proteins

| | Differential Scanning | | Dynamic Light Scattering | |
|---|---|---|---|---|
| | Calorimetry | | (DLS) | |
| | (DSC) | | Z- avg | |
| SARS-CoV-2 S | Tₘₐₓ | ΔHcal | diameter² | |
| protein | (° C.)¹ | (kJ/mol) | (nm) | PDI³ |
| Wild-type | 58.6 | 153 | 69.53 | 0.46 |
| BV2365 | 61.3 | 466 | 33.40 | 0.25 |
| BV2373 | 60.4 | 732 | 27.21 | 0.29 |

¹Tₘₐₓ: melting temperature
²Z-avg: Z-average particle size
³PDI: polydispersity index

[0406] The thermal stability of the S-trimers was determined by differential scanning calorimetry (DSC). The thermal transition temperature of the wild-type CoV S-protein (Tₘₐₓ=58.6° C.) was similar to BV2365 and BV2373 with a Tₘₐₓ=61.3° C. and 60.4° C., respectively (Table 3). Of greater significance, was the 3-5 fold increased enthalpy of transition required to unfold the BV2365 and BV2373 variants (ΔHcal=466 and 732 kJ/mol, respectively) compared to the lower enthalpy required to unfold the WT spike protein (ΔHcal=153 kJ/mol). These results are consistent with improved thermal stability of the BV2365 and BV2373 compared to that of WT spike protein (Table 3).

[0407] The stability of the CoV Spike (S) polypeptide nanoparticle vaccines was evaluated by dynamic light scattering. Various pHs, temperatures, salt concentrations, and proteases were used to compare the stability of the CoV Spike (S) polypeptide nanoparticle vaccines to nanoparticle vaccines containing the native CoV Spike (S) polypeptide.

### Example 5

### Stability of Coronavirus Spike (S) Polypeptide Nanoparticle Vaccines

[0408] The stability of the CoV Spike (S) polypeptide nanoparticle vaccines was evaluated by dynamic light scattering. Various pHs, temperatures, salt concentrations, and proteases were used to compare the stability of the CoV Spike (S) polypeptide nanoparticle vaccines to nanoparticle vaccines containing the native CoV Spike (S) polypeptide. The stability of BV2365 without the 2-proline substitutions and BV2373 with two prolines substitution was assessed under different environmental stress conditions using the hACE2 capture ELISA. Incubation of BV2373 at pH extremes (48 hours at pH 4 and pH 9), with prolonged agitation (48 hours), and through freeze/thaw (2 cycles), and elevated temperature (48 hours at 25° C. and 37° C.) had no effect on hACE2 receptor binding (IC50=14.0-18.3 ng mL-1).

[0409] Oxidizing conditions with hydrogen peroxide reduced binding of hACE2 binding to BV2373 8-fold (IC50=120 ng mL-1) (FIG. 12A). BV2365 without the 2-proline substitutions was less stable as determined by a significant loss of hACE2 binding under multiple conditions (FIG. 12B).

[0410] The stability of BV2384 (SEQ ID NO: 110) and BV2373 (SEQ ID NO: 87) were compared. BV2384 has a furin cleavage site sequence of GSAS (SEQ ID NO: 97), whereas BV2373 has a furin cleavage site of QQAQ (SEQ ID NO: 7). As demonstrated by SDS-PAGE and Western Blot, BV2384 showed extensive degradation in comparison to BV2373 (FIG. 32). Furthermore, scanning densitometry and recovery data demonstrate the unexpected loss of full length CoV S protein BV2384, lower purity, and recovery (FIG. 33) in comparison to BV2373 (FIG. 34).

### Example 6

### Immune Response in Cynomolgus Macaques

[0411] We assessed the immune response induced by BV2373 in a Cynomolgus macaque model of SARS-CoV-2 infection. Groups 1-6 were treated as shown in Table 4.

TABLE 4
Groups 1-6 of Cynomolgus macaque study

| | | | | Immuni- | Blood | |
|---|---|---|---|---|---|---|
| Group | BV2373 | | MATRIX-M ™ | zation | Draw | Challenge |
| (N = 4) | Dose | | Dose | (Days) | (days) | (Day) |
| 1 | Placebo | | — | 0, 21 | 0, 21, 33 | 35 |
| 2 | 2.5 | μg | 25 μg | 0, 21 | 0, 21, 33 | 35 |
| 3 | 5 | μg | 25 μg | 0 | 0, 21, 33 | 35 |
| 4 | 5 | μg | 50 μg | 0, 21 | 0, 21, 33 | 35 |
| 5 | 5 | μg | 50 μg | 0 | 0, 21, 33 | 35 |
| 6 | 25 | μg | 50 μg | 0, 21 | 0, 21, 33 | 35 |

[0412] Administration of a vaccine comprising BV2373 resulted in the induction of anti-CoV-S antibodies (FIG. 35A) including neutralizing antibodies (FIG. 35B). Anti-CoV-S antibodies were induced after administration of one (FIG. 38A) or two doses (FIG. 38B) of BV2373. Administration of the vaccine comprising BV2373 also resulted in the production of antibodies that blocked binding of the CoV S protein to hACE2 (FIG. 38C and FIG. 38D). There was a significant correlation between anti-CoV S polypeptide IgG titer and hACE2 inhibition titer in Cynomolgus macaques after administration of BV2373 (FIG. 38E). The ability of BV2373 to induce the production of neutralizing antibodies was evaluated by cytopathic effect (CPE) (FIG. 40A) and plaque reduction neutralization test (PRNT) (FIG. 40B). The data revealed that vaccine formulations of Table 4 produced SARS-CoV-2 neutralizing titers, in contrast to the control.

[0413] The vaccine comprising BV2373's ability to induce anti-CoV-S antibodies and antibodies that block binding of hACE2 to the CoV S protein in Cynomolgus macaques was compared to human convalescent serum. The data revealed that the BV2373 vaccine formulation induced superior anti-CoV S polypeptide and hACE2 inhibition titers as compared to human convalescent serum (FIG. 39).

[0414] The BV2373 vaccine formulation also caused a decrease of SARS-CoV-2 viral replication (FIGS. 36A-B). Viral RNA (FIG. 36A, corresponding to total RNA present) and viral sub-genomic RNA (sgRNA) (FIG. 36B, corresponding to replicating virus) levels were assessed in bronchiolar lavage (BAL) at 2 days and 4 days post-challenge with infectious virus (d2pi and d4pi). Most subjects showed no viral RNA. At Day 2 small amounts of RNA were measured in some subjects. By Day 4, no RNA was measured except for two subjects at the lowest dose of 2.5 μg. Sub-genomic RNA was not detected at either 2 days or 4 days except for 1 subject, again at the lowest dose. Viral RNA (FIG. 37A) and viral sub-genomic (sg) RNA (FIG. 37B) were assessed by nasal swab at 2 days and 4 days post-infection (d2pi and d4pi). Most subjects showed no viral RNA. At Day 2 and Day 4 small amounts of RNA were measured in some subjects. Sub-genomic RNA was not detected at either 2 Days or 4 days. Subjects were immunized. Day 0 and in the groups with two doses Day 0 and Day 21. These data show that the vaccine decreases nose total virus RNA by 100-1000 fold and sgRNA to undetectable levels, and confirm that immune response to the vaccine will block viral replication and prevent viral spread.

### Example 7

### Evaluation of CoV S Polypeptide Nanoparticle Vaccines in Humans

[0415] We assessed the safety and efficacy of a vaccine comprising BV2373 in a randomized, observer-blinded, placebo-controlled Phase 1 clinical trial in 131 healthy participants 18-59 years of age. Participants were immunized with two intramuscular injections, 21 days apart. Participants received BV2373 with or without MATRIX-M™ (n=106) or placebo (n=25). Groups A-E were treated as shown in Table 5. FIG. 41 shows a timeline of the evaluation of clinical endpoints.

TABLE 5
Groups A-E of Phase 1 Human Study

| | | | Day 0 | | | | Day 21 (+5 days) | | | |
|---|---|---|---|---|---|---|---|---|---|---|
| Group | Participants | | BV2373 | | MATRIX-M^{TM} | | BV2373 | | MATRIX-M^{TM} | |
| (N = 25) | Randomized | Sentinel | Dose | | Dose | | Dose | | Dose | |
| A | 25 | — | 0 | μg | 0 | μg | 0 | μg | 0 | μg |
| B | 25 | — | 25 | μg | 0 | μg | 25 | μg | 0 | μg |
| C | 25 | 3 | 5 | μg | 50 | μg | 5 | μg | 50 | μg |
| D | 25 | 3 | 25 | μg | 50 | μg | 25 | μg | 50 | μg |
| E | 25 | — | 25 | μg | 50 | μg | 0 | μg | 0 | μg |

[0416] Overall reactogenicity was mild, and the vaccinations were well tolerated. Local reactogenicity was more frequent in patients treated with BV2373 and MATRIX-M™ (FIGS. 42A-B).

[0417] The immunogenicity of BV2373 with and without MATRIX-M™ was evaluated. 21 days after vaccination, anti-CoV-S antibodies were detected for all vaccine regimens (FIG. 43A). Geometric mean fold rises (GMFR) in vaccine regimens comprising MATRIX-M™ exceeded those induced by unadjuvanted BV2373. 7 days after a second vaccination (day 28), the anti-CoV-S titer increased an additional eight-fold over responses seen with first vaccination and within 14 days (Day 35) responses had more than doubled yet again, achieving GMFRs approximately 100-fold over those observed with BV2373 alone. A single vaccination with BV2373/MATRIX-M™ achieved similar anti-CoV-S titer levels to those in asymptomatic (exposed) COVID-19 patients. A second vaccination achieved GMEU levels that exceeded convalescent serum from outpatient-treated COVID-19 patients by six-fold, achieved levels similar to convalescent serum from patients hospitalized with COVID-19, and exceeded overall convalescent serum anti-CoV-S antibodies by nearly six-fold. The responses in the two-dose 5-μg and 25-μg BV2373/MATRIX-M™ regimens were similar. This highlights the ability of the adjuvant (MATRIX-M™) to enable dose sparing.

[0418] Neutralizing antibodies were induced in all groups treated with BV2373 (FIG. 43B). Groups treated with BV2373 and MATRIX-M™ regimens exhibited an approximately five-fold GMFR than groups treated with BV2373 alone (FIG. 43B). Second vaccinations with adjuvant had a profound effect on neutralizing antibody titers—inducing >100 fold rise over single vaccinations without adjuvant. When compared to convalescent serum, second vaccinations with BV2373/MATRIX-M™ achieved GMT levels four-fold greater than outpatient-treated COVID-19 patients, levels spanning those of patients hospitalized with COVID-19, and exceeded overall convalescent serum GMT by four fold.

[0419] Convalescent serum, obtained from COVID-19 patients with clinical symptoms requiring medical care, demonstrated proportional anti-CoV-S IgG and neutralization titers that increased with illness severity (FIGS. 43A-B).

[0420] A strong correlation was observed between neutralizing antibody titers and anti-CoV-S IgG in patients treated with BV2373 and MATRIX-M™ (r=0.9466, FIG. 44C) similar to that observed in patients treated with convalescent sera (r=0.958) (FIG. 44A). This correlation was not observed in subjected administered unadjuvanted BV2373 (r=0.7616) (FIG. 44B). Both 5 μg and 25 μg BV2373/MATRIX-M™ groups (groups C-E of Table 5) demonstrated similar magnitudes of two-dose responses and every participant seroconverted using either assay measurement when a two-dose regimen was utilized.

[0421] T-cell responses in 16 participants (four participants from each of Groups A through D) showed that BV2373/MATRIX-M™ regimens induced antigen-specific polyfunctional CD4+ T-cell responses in terms of IFN-γ, IL-2, and TNF-α production upon stimulation with BV2373. There was a strong bias toward production of Th1 cytokines (FIGS. 45A-D).

### Example 8

### Expression, Purification, and Evaluation of Next-Generation CoV S Polypeptide Nanoparticles

[0422] CoV S polypeptides having the amino acid sequence of SEQ ID NO: 112, SEQ ID NO: 113, SEQ ID NO: 114, or SEQ ID NO: 115 are expressed in a baculovirus expression system and recombinant plaques expressing the coronavirus Spike (S) polypeptides are picked and confirmed. CoV S polypeptides having a sequence of SEQ ID NO: 112, SEQ ID NO: 113, SEQ ID NO: 114, and SEQ ID NO: 115 are expressed using an N-terminal signal peptide having an amino acid sequence of SEQ ID NO: 5.

[0423] The CoV S polypeptide having a sequence of SEQ ID NO: 112 comprises a mutation of Asn-488 to tyrosine, mutations of Lys-973 and Val-974 to proline, and an inactivated furin cleavage site having the amino acid sequence of QQAQ (SEQ ID NO: 7).

[0424] The CoV S polypeptide having a sequence of SEQ ID NO: 113 comprises mutation of Asp-601 to glycine, mutation of Asn-488 to tyrosine, mutations of Lys-973 and Val-974 to proline, and an inactivated furin cleavage site having the amino acid sequence of QQAQ (SEQ ID NO: 7).

[0425] The CoV S polypeptide having a sequence of SEQ ID NO: 114 comprises deletion of amino acids 56, 57, and 131, mutation of Asn-488 to tyrosine, a mutation of Ala-557 to aspartate, mutation of Asp-601 to glycine, mutation of Pro-668 to histidine, mutation of Thr-703 to isoleucine, mutation of Ser-969 to alanine, mutation of Asp-1105 to histidine, mutations of Lys-973 and Val-974 to proline, and an inactivated furin cleavage site having the amino acid sequence of QQAQ (SEQ ID NO: 7).

[0426] The CoV S polypeptide having a sequence of SEQ ID NO: 115 comprises mutation of Asn-488 to tyrosine, mutation of Asp-67 to alanine, mutation of Leu-229 to histidine, mutation of Asp-202 to glycine, mutation of Lys-404 to asparagine, mutation of Glu-471 to lysine, mutation of Ala-688 to valine, mutation of Asp-601 to glycine, mutations of Lys-973 and Val-974 to proline, and an inactivated furin cleavage site having the amino acid sequence of QQAQ.

[0427] CoV S polypeptide nanoparticles are generated as in Example 1. The stability and immunogenicity of CoV S polypeptides having an amino acid sequence of SEQ ID NO: 112, SEQ ID NO: 112, SEQ ID NO: 113, and SEQ ID NO: 115 is evaluated as in Examples 2-7.

### Example 9

### BV2373 and Saponin Adjuvant Induce Protective Immune Responses Against Heterogeneous SARS-CoV-2 Strains

[0428] Purpose: We conducted a phase 3, randomized, observer-blinded, placebo-controlled trial in adults 18-84 years old who received two intramuscular 5-μg doses, 21 days apart, of BV2373 and saponin adjuvant (Fraction A and Fraction C iscom matrix, also referred to as MATRIX-M™ in this example) or placebo (1:1) across 33 sites in the United Kingdom. The primary efficacy endpoint was virologically confirmed mild, moderate, or severe COVID-19 with onset 7 days after second vaccination.

[0429] A total of 15,187 participants were randomized, of whom 7569 participants received BV2373 and MATRIX-M™ and 7570 received placebo; 27.8% were 65 years or older, and 4% had baseline serological evidence of SARS-CoV-2 infection. There were 10 cases of COVID-19 among BV2373 and MATRIX-M™ recipients and 96 cases among placebo recipients, with symptom onset at least 7 days after second vaccination; BV2373 and MATRIX-M™ was 89.7% (95% confidence interval, 80.2 to 94.6) effective in preventing COVID-19. There were five cases of severe COVID-19, all of which were reported in the placebo group. A post hoc analysis revealed efficacies of 96.4% (73.8 to 99.5) and 86.3% (71.3 to 93.5) against the prototype SARS-COV-2 strain and B.1.1.7 variant, respectively. The prototype SARS-CoV-2 strain comprises a CoV S protein having the amino acid sequence of SEQ ID NO: 2. The B.1.1.7 variant comprises a CoV S protein having deletions of amino acids 56, 57, and 131 and mutations of N488Y, A557D, D601G, P668H, T703I, S969A, and D1105H, wherein the CoV S polypeptide is numbered with respect to the wild-type SARS-CoV-2 S polypeptide having the amino acid sequence of SEQ ID NO: 2. Vaccine efficacy was similar across subgroups, including participants with comorbidities and those ≥65 years old. Reactogenicity was generally mild and transient and occurred more frequently in the group administered BV2373 and MATRIX-M™. The incidence of serious adverse events was low and similar in the two groups. A two-dose regimen of BV2373 and MATRIX-M™ conferred 89.7% efficacy against a blend of prototype and B.1.1.7 variant, with a safety profile similar to that of other authorized COVID-19 vaccines.

[0430] Methods: Trial Design and Participants: We assessed the safety and efficacy of two 5-μg doses of BV2373 and MATRIX-M™ or placebo, administered intramuscularly 21 days apart. This phase 3 trial was conducted at 33 recruitment sites in the UK. Eligible participants were men and non-pregnant women 18 to 84 years old (inclusive) who were healthy or had stable chronic medical conditions, including but not limited to human immunodeficiency virus and cardiac and respiratory diseases. Health status, assessed at screening, was based on medical history, vital signs, and physical examination. Key exclusion criteria included a history of documented COVID-19, treatment with immunosuppressive therapy, or diagnosis with an immunodeficient condition.

[0431] Participants were randomly assigned in a 1:1 ratio via block randomization to receive two doses of BV2373 and MATRIX-M™ or placebo (normal saline), 21 days apart, using a centralized Interactive Response Technology system according to pre-generated randomization schedules. Randomization was stratified by site and by age≥65 years. In a 400-person sub-study, participants received a concomitant dose of seasonal influenza vaccine with the first dose. This was an observer-blinded study.

[0432] After each vaccination, participants remained under observation at the study site for at least 30 minutes to monitor for the presence of any acute reactions. Solicited local and systemic adverse events were collected via an electronic diary for 7 days after each dose in a subgroup of participants (solicited adverse event subgroup). All participants were assessed for unsolicited adverse events from the first dose through 28 days after the second dose; serious adverse events, adverse events of special interest, and medically attended adverse events were assessed from the first dose through 1 year after the second dose. Safety data are reported for all participants who received at least one dose of vaccine or placebo.

[0433] Safety and Efficacy: The primary endpoint was the efficacy of BV2373 and MATRIX-M™ against the first occurrence of virologically confirmed symptomatic mild, moderate, or severe COVID-19, with onset at least 7 days after second vaccination in participants who were seronegative at baseline. Symptomatic COVID-19 was defined according to US Food and Drug Administration (FDA) criteria.

[0434] Symptoms of suspected COVID-19 were monitored throughout the trial and collected using a COVID-19 electronic symptom diary (InFLUenza Patient-Reported Outcome [FLU-PRO©] questionnaire) for at least 10 days. At the onset of suspected symptoms of COVID-19, respiratory specimens from the nose and throat were collected daily over a 3-day period to confirm SARS-CoV-2 infection. Virological confirmation was performed using polymerase chain reaction (PCR) testing (UK DHSC laboratories) with the Thermo TaqPath™ system (Thermo Fisher Scientific, Waltham, Mass., USA).

[0435] Safety was analyzed in all participants who received at least one dose of BV2373 and MATRIX-M™ or placebo and summarized descriptively. Solicited local and systemic adverse events were also summarized by FDA toxicity grading criteria and duration after each injection. Unsolicited adverse events were coded by preferred term and system organ class using the Medical Dictionary for Regulatory Activities (MedDRA), version 23.1, and summarized by severity and relationship to study vaccine.

[0436] The trial was designed and driven by the total number of events expected to achieve statistical significance for the primary endpoint—a target of 100 mild, moderate, or severe Covid-19 cases. The target number of 100 cases for the final analysis was chosen to provide >95% power for 70% or higher vaccine efficacy. A single interim analysis of efficacy was conducted based on the accumulation of approximately 50% (50 events) of the total anticipated primary endpoints using Pocock boundary conditions. The main (hypothesis testing) event-driven analysis for the interim and final analyses of the primary objective was carried out at an overall one-sided type I error rate of 0.025 for the primary endpoint. The primary endpoint was analyzed in participants who were seronegative at baseline, received both doses of study vaccine or placebo, had no major protocol deviations affecting the primary endpoint, and had no confirmed cases of symptomatic Covid-19 within 6 days after the second injection (per-protocol efficacy population). Vaccine efficacy was defined as E (%)=(1−RR)×100, where RR=relative risk of incidence rates between the two study groups (BV2373 and MATRIX-M™ or placebo). Mean disease incidence rate was reported as incidence rate per year in 1000 people. The estimated RR and its confidence interval (CI) were derived using Poisson regression with robust error variance. Hypothesis testing of the primary endpoint was carried out against the null hypothesis: H0: vaccine efficacy≤30%. The success criterion required rejection of the null hypothesis to demonstrate a statistically significant vaccine efficacy.

[0437] Between Sep. 28 and Nov. 28, 2020, a total of 16,645 participants were screened and 15,187 participants were randomized (FIG. 47). A total of 15,139 participants received at least one dose of BV2373 and MATRIX-M™ (7569) or placebo (7570), with 14,039 participants (7020 in the BV2373 and MATRIX-M™ group and 7019 in the placebo group) meeting the criteria for the per-protocol efficacy population. Baseline demographics were well balanced between the BV2373 and MATRIX-M™ and placebo groups in the per-protocol efficacy population, where 48.4% were female, 94.5% were White, 0.4% were Black or African American, 0.8% were Hispanic or Latino, and 44.6% had at least one comorbid condition (based on Centers for Disease Control and Prevention [CDC] definitions. The median age of these participants was 56 years, and 27.9% were ≥65 years old. Table 6 provides a summary of the baseline demographics of the participants of the clinical trial.

TABLE 6
Demographics and Baseline Characteristics
of Clinical Trial Participants

| | BV2373 and | | | | | |
|---|---|---|---|---|---|---|
| | MATRIX-M ™ | | Placebo | | Total | |
| | n = 7020 | | n = 7019 | | N = 14,039 | |
| Age, y | | | | | | |
| Median | 56.0 | | 56.0 | | 56.0 | |
| Range | 18, 84 | | 18, 84 | | 18, 84 | |
| Age group, n (%) | | | | | | |
| 18-64 y | 5067 | (72.2) | 5062 | (72.1) | 10129 | (72.1) |
| ≥65 y | 1953 | (27.8) | 1957 | (27.9) | 3910 | (27.9) |
| Sex, n (%) | | | | | | |
| Male | 3609 | (51.4) | 3629 | (51.7) | 7238 | (51.6) |
| Female | 3411 | (48.6) | 3390 | (48.3) | 6801 | (48.4) |
| Race or ethnic | | | | | | |
| group, n (%) | | | | | | |
| White | 6625 | (94.4) | 6635 | (94.5) | 13260 | (94.5) |
| Black or African | 26 | (0.4) | 26 | (0.4) | 52 | (0.4) |
| American | | | | | | |
| Asian | 201 | (2.9) | 212 | (2.9) | 413 | (2.9) |
| American Indian | 4 | (<0.1) | 0 | | 4 | (<0.1) |
| or Alaska Native | | | | | | |
| Native Hawaiian | 1 | (<0.1) | 0 | | 1 | (<0.1 |
| or other Pacific | | | | | | |
| Islander | | | | | | |
| Multiple | 70 | (1.0) | 59 | (0.8) | 136 | (0.9) |
| Not reported | 85 | (1.2) | 79 | (1.1) | 176 | (1.2) |
| Other | 4 | (<0.1) | 6 | (<0.1) | 11 | (<0.1) |
| Missing | 4 | | 2 | | 8 | |
| Hispanic or | 63 | (0.9) | 51 | (0.7) | 114 | (0.8) |
| Latinx | | | | | | |
| SARS-CoV-2 | | | | | | |
| serostatus, n (%) | | | | | | |
| Negative | 6964 | (99.2%) | 6944 | (98.9) | 13908 | (99.1) |
| Positive | 0 | | 0 | | 0 | |
| Missing | 56 | | 75 | | 131 | |
| BMI, kg/m², | | | | | | |
| n (%) | | | | | | |
| >30.0: obese | 313 | (4.5) | 323 | (4.6) | 636 | (4.5) |
| Comorbidity | | | | | | |
| status* | | | | | | |
| Yes | 3117 | (44.4) | 3143 | (44.8) | 6260 | (44.6) |
| No | 3903 | (55.6) | 3876 | (55.2) | 7779 | (55.4) |

[0438] SD, standard deviation; body mass index (BMI) is calculated as weight (kg) divided by squared height (m). Percentages are based on per-protocol efficacy analysis set within each treatment and overall. *Comorbid subjects are those identified who have at least one of the comorbid conditions reported as a medical history or have a screening BMI value greater than 30 kg/m².

[0439] The solicited adverse event subgroup included 2714 participants. Overall, BV2373 and MATRIX-M™ recipients reported higher frequencies of solicited local adverse events than placebo recipients after both the first dose (59.4% vs. 20.9%) and the second dose (80.2% vs. 17.0%) (FIG. 50).

[0440] Among BV2373 and MATRIX-M™ recipients, the most commonly reported local adverse events were injection site tenderness and pain after both the first dose (54.9% and 30.7%) and the second dose (76.6% and 51.9%), with most events being grade 1 (mild) or 2 (moderate) in severity and of short mean duration (2.3 and 1.7 days after the first dose and 2.8 and 2.2 days after the second dose). Solicited local adverse events were reported more frequently among younger BV2373 and MATRIX-M™ recipients (18 to 64 years) than older BV2373 and MATRIX-M™ recipients (≥65 years).

[0441] Overall, BV2373 and MATRIX-M™ recipients reported higher frequencies of solicited systemic adverse events than placebo recipients after both the first dose (47.6% vs. 37.9%) and the second dose (64.6% vs. 30.8%) (FIG. 50). Among BV2373 and MATRIX-M™ recipients, the most commonly reported systemic adverse events were headache, muscle pain, and fatigue after both the first dose (24.5%, 22.3%, and 20.5%) and the second dose (40.7%, 41.1%, and 41.0%), with most events being grade 1 or 2 in severity and of short mean duration (1.6, 1.5, and 1.9 days after the first dose and 1.9, 1.8, and 1.9 days after the second dose). Grade 4 systemic adverse events were reported in two BV2373 and MATRIX-M™ participants after the first dose and in one BV2373 and MATRIX-M™ participant after the second dose. Systemic adverse events were reported more often by younger vaccine recipients than by older vaccine recipients and more often after dose 2 than dose 1. Notably, fever (temperature≥38° C.) was reported in 2.3% and 5.1% of BV2373 and MATRIX-M™ participants after the first and second doses, with grade 3 fever (39-40° C.) in 0.4% and 0.6% of participants after the first and second doses, respectively; one grade 4 fever (>40° C.) was reported after each dose of vaccine.

[0442] All 15,139 participants who received at least one dose of vaccine or placebo through the data cutoff date of the final efficacy analysis were assessed for unsolicited adverse events. The frequency of unsolicited adverse events was higher among BV2373 and MATRIX-M™ recipients than among placebo recipients (25.3% vs. 20.5%), with similar frequencies of severe adverse events (1.0% vs. 0.8%), serious adverse events (0.5% vs. 0.5%), medically attended adverse events (3.8% vs. 3.9%), adverse events leading to vaccine (0.3% vs. 0.3%) or study (0.2% vs. 0.2%) discontinuation, potential immune-mediated medical conditions (<0.1 vs. <0.1%), and adverse events of special interest relevant to COVID-19 (0.1% vs. 0.3%). One related serious adverse event was reported in an BV2373 and MATRIX-M™ recipient (myocarditis), which was considered a potentially immune-mediated condition; an independent SMC considered the event most likely a viral myocarditis. The participant recovered. There were no episodes of anaphylaxis, and no evidence of vaccine-associated enhanced disease. Two COVID-19-related deaths were reported, one in the BV2373 and MATRIX-M™ group, with onset of symptoms 7 days after receiving a single vaccine dose, and one in the placebo group.

[0443] Among 14,039 participants in the per-protocol efficacy population, there were 10 cases of virologically confirmed, symptomatic mild, moderate or severe COVID-19 with onset at least 7 days after the second dose among vaccine recipients (6.53 per 1000 person-years; 95% CI: 3.32 to 12.85) and 96 cases among placebo recipients (63,43 per 1000 person-years; 95% CI: 45.19 to 89.03) for a vaccine efficacy of 89.7% (95% CI, 80.2 to 94.6; FIG. 49). Of the 10 cases ≥65 years old who had mild, moderate, or severe Covid-19, one had received BV2373 and MATRIX-M™ and nine had received placebo. Severe COVID-19 occurred in five participants, of whom none had received BV2373 and MATRIX-M™ and five had received placebo. There were no hospitalizations or deaths among per-protocol vaccine recipients. Vaccine efficacy among participants ≥65 years was 88.9% (95% CI, 12.8 to 98.6 and efficacy from 14 days after dose 1 was 83.4% (95% CI, 73.6 to 89.5) (FIG. 49). A post hoc analysis of the primary endpoint identified 29, 66, and 11 cases of Covid-19 where the isolated strain was the SARS CoV-2 prototype strain, SARS-CoV-2 B.1.1.7 variant, or unknown, respectively. Unknown samples were those where the PCR tests were performed with a non-DHSC PCR test (e.g., at a local hospital laboratory) where variant determination was not performed. Vaccine efficacy against the prototype strain was 96.4% (95% CI, 73.8 to 99.4), while efficacy against the B.1.1.7 variant was 86.3% (95% CI, 71.3 to 93.5). (FIG. 49).

[0444] Discussion: A two-dose regimen of BV2373 and MATRIX-M™, given 21 days apart, was found to be safe and 89.7% effective against symptomatic COVID-19 caused by both prototype and B.1.1.7 variants. The timing of accumulated cases in this study allowed for a post hoc assessment of vaccine efficacy against different strains, including the B.1.1.7 variant, which is now circulating widely outside of the United Kingdom and is soon expected to be the most prominent strain in United States. This variant is known to be more transmissible and to be associated with a higher case fatality rate than previous strains, emphasizing the need for an effective vaccine. This is the first vaccine to demonstrate high vaccine efficacy (86.3%) against the B.1.1.7 variant in a phase 3 trial. Although the study was not powered to assess efficacy for individual SARS-CoV-2 strains, BV2373 and saponin adjuvant demonstrated significant efficacy against all strains detected in trial participants. In particular, the 96.4% point estimate of efficacy determined against the prototype strain is similar to that reported against this strain for the BNT161b2 mRNA vaccine (95.0%) and the mRNA-1273 vaccine (94.1%) and greater than that demonstrated by the adenoviral vector vaccines.

[0445] Finally, the BV2373 and saponin adjuvant composition also showed efficacy against the B.1.351 variant.

[0446] Prevention of severe disease (including hospitalization, intensive care admission, and death) is an important objective of a vaccination program, and the two-dose regimen of BV2373 and saponin adjuvant demonstrated very high efficacy, similar to that reported for other licensed Covid-19 vaccines. In addition, BV2373 and saponin adjuvant provided levels of protection after the first dose in a range similar to that of other COVID-19 vaccines. The favorable safety profile observed during phase 1/2 studies of BV2373 and saponin adjuvant was confirmed in this phase 3 trial. Reactogenicity was generally mild or moderate, and reactions were less common and milder in older subjects and more common after the second dose. Injection site tenderness and pain, fatigue, headache, and muscle pain were the most commonly reported local and systemic adverse events and were more common with the vaccine than placebo. The incidence of serious adverse events was similar in the vaccine and placebo groups (0.5% in each) and no deaths were attributable to receipt of the vaccine.

[0447] The results of this trial provide further evidence that COVID-19 caused by prototype SARS-CoV-2 and the SARS-CoV-2 variant B.1.1.7 can be prevented by immunization, providing the first evidence for a protein-based, adjuvanted vaccine. These data confirm that BV2373 and saponin adjuvant can be stored at standard refrigerator temperatures and, moreover, can induce a broad epitope response to the spike protein antigen. This broad response provide protective efficacy against a range of heterogenous SARS-CoV-2 strains.

### Example 10

### BV2438 and Saponin Adjuvant Induce Protective Immune Responses Against Heterogeneous SARS-CoV-2 Strains

[0448] Purpose: The immunogenicity and in vivo protection of compositions containing the recombinant CoV Spike (rS) protein BV2438 (SEQ ID NO: 132), BV2373 (SEQ ID NO: 87), or both, in combination with a saponin adjuvant was evaluated. The saponin adjuvant contains two iscom particles, wherein: the first iscom particle comprises fraction A of Quillaja Saponaria Molina and not fraction C of Quillaja Saponaria Molina; and the second iscom particle comprises fraction C of Quillaja Saponaria Molina and not fraction A of Quillaja Saponaria Molina. Fraction A and Fraction C account for 85% and 15% by weight, respectively, of the sum of the weights of fraction A of Quillaja Saponaria Molina and fraction C of Quillaja Saponaria Molina in the adjuvant.

[0449] The efficacy of BV2438 and BV2373 immunization regimens alone or in combination with the aforementioned saponin adjuvant against the SARS-CoV-2/WA1, SARS-CoV-2/B.1.1.7 and SARS-CoV-2/B.1.351 strains were evaluated. The SARS-CoV-2/WA1 strain has a CoV S polypeptide having the amino acid sequence of SEQ ID NO: 2. The SARS-CoV-2/B.1.1.7 strain has a CoV S polypeptide comprising deletions of amino acids 69, 70, and 144 and mutations of N501Y, A570D, D614G, P681H, T716I, S982A, and D1118H, wherein the CoV S polypeptide is numbered with respect to the wild-type SARS-CoV-2 S polypeptide having the amino acid sequence of SEQ ID NO: 1. The SARS-CoV-2/B.1.351 strain has a CoV S polypeptide comprising polypeptide comprising mutations of D80A, L242H, R246I, A701V, N501Y, K417N, E484K, and D614G, wherein the CoV S polypeptide is numbered with respect to the wild-type SARS-CoV-2 S polypeptide having the amino acid sequence of SEQ ID NO: 1.

[0450] Methods:

[0451] Cells and Virus: Virus and cells were processed as described previously (18). Briefly, Vero E6 cells (ATCC #CRL 1586) were cultured in DMFM (Quality Biological), supplemented with 10% (v/v) fetal bovine serum (Gibco), 1% (v/v) penicillin/streptomycin (Gemini Bio-products) and 1% (v/v) L-glutamine (2 mM final concentration, Gibco) (Vero media). Cells were maintained at 37° C. and 5% CO2. SARS-CoV-2/WA1 were provided by the CDC (BEI #NR-52281). SARS-CoV-2/B.1.17 and SARS-CoV-2/B.1.351 were generously provided by Dr. Andy Pekosz at The Johns Hopkins University obtained. Stocks for both viruses were prepared by infection of Vero E6 cells for two days when CPE was starting to be visible. Media were collected and clarified by centrifugation prior to being aliquoted for storage at −80° C. Titer of stock was determined by plaque assay using Vero E6 cells as described previously.

[0452] SARS-CoV-2 Protein Expression: SARS-CoV-2 constructs were synthetically produced from the full-length S glycoprotein gene sequence (GenBank MN908947 nucleotides 21563-25384). The full-length S-genes were codon optimized for expression in Spodoptera frugiperda (Sf9) cells and synthetically produced by GenScript (Piscataway, N.J., USA). The QuikChange Lightning site-directed mutagenesis kit (Agilent) was used to produce two spike protein variants: the furin cleavage site (682-RRAR-685) was mutated to 682-QQAQ-685 to be protease resistant and two proline substitutions at positions K986P and V987P (2P) were introduced to produce the double mutant, BV2373. To generate the recombinant Spike construct based on the B.1.351 variant, the following point mutations were also introduced: D60A, D215G, L242H, K417N, E484K, N501Y, D614G, and A701V. Full-length S-genes were cloned between the BamHI-HindIII sites in the pFastBac baculovirus transfer vector (Invitrogen, Carlsbad, Calif.) under transcriptional control of the Autographa californica polyhedron promoter. Recombinant baculovirus constructs were plaque purified and master seed stocks prepared and used to produce the working virus stocks. The baculovirus master and working stock titers were determined using rapid titer kit (Clontech, Mountain View, Calif.). Recombinant baculovirus stocks were prepared by infecting Sf9 cells with a multiplicity of infection (MOI) of ≤0.01 plaque forming units (pfu) per cell.

[0453] Expression and Purification: SARS-CoV-2 S proteins were produced in Sf9 cells as previously described. Briefly, cells were expanded in serum-free medium and infected with recombinant baculovirus. Cells were cultured at 27±2° C. and harvested at 68-72 hours post-infection by centrifugation (4000×g for 15 min). Cell pellets were suspended in 25 mM Tris HCl (pH 8.0), 50 mM NaCl and 0.5-1.0% (v/v) polyoxyethylene nonylphenol (NP-9, TERGITOL®) NP-9 with leupeptin. S-proteins were extracted from the plasma membranes with Tris buffer containing NP-9 detergent, clarified by centrifugation at 10,000×g for 30 min. S-proteins were purified by TMAE anion exchange and lentil lectin affinity chromatography. Hollow fiber tangential flow filtration was used to formulate the purified spike protein at 100-150 μg mL-1 in 25 mM sodium phosphate (pH 7.2), 300 mM NaCl, 0.02% (v/v) polysorbate 80 (PS 80). Purified S-proteins were evaluated by 4-12% gradient SDS-PAGE stained with Gel-Code Blue reagent (Pierce, Rockford, Ill.) and purity was determined by scanning densitometry using the OneDscan system (BD Biosciences, Rockville, Md.).

[0454] Differential Scanning Calorimetry: Samples (BV2426 Lot 1 Feb. 2021 and BV2373 Lot 15 Dec. 2020; rS-B.1.351BV2438 and rS-WU1BV2373, respectively) and corresponding buffers were heated from 4° C. to 120° C. at 1° C. per minute and the differential heat capacity change was measured in a NanoDSC (TA Instruments, New Castle, Del.). A separate buffer scan was performed to obtain a baseline, which was subtracted from the sample scan to produce a baseline-corrected profile. The temperature where the peak apex is located is the transition temperature (Tmax) and the area under the peak provides the enthalpy of transition (ΔHcal).

[0455] Transmission Electron Microscopy and 2D Class Averaging: Electron microscopy was perform by NanoImaging Services (San Diego, Calif.) with a FEI Tecani T12 electron microscope, operated at 120 keV equipped with a FEI Eagle 4 k×4 k CCD camera. SARS-CoV-2 S proteins were diluted to 2.5 μg mL-1 in formulation buffer. The samples (3 μL) were applied to nitrocellulose-supported 400-mesh copper grids and stained with uranyl format. Images of each grid were acquired at multiple scales to assess the overall distribution of the sample. High-magnification images were acquired at nominal magnifications of 150,000× (X nm/pixel) and 92,000× (0.16 nm/pixel). The images were acquired at a nominal defocus of −2.0 μm to −1.5 μm (110,000×) and electron doses of ˜25 e/Å².

[0456] For class averaging, particles were identified from 92,000× high magnification images, followed by alignment and classification as previously described.

[0457] Kinetics of SARS-CoV-2 S binding to hACE2 receptor by Bioluminescence Imaging (BLI): S-protein receptor binding kinetics was determined by bio-layer interferometry (BLI) using an Octet QK384 system (Pall Forté Bio, Fremont, Calif.). His-tagged human ACE2 (2 μg mL-1) was immobilized on nickel-charged Ni-NTA biosensor tips. After baseline, SARS-CoV-2 rS protein solutions were 2-fold serially diluted in kinetics buffer over a range of 300 nM to 4.7 nM, allowed to associate for 600 sec, followed by dissociation for an additional 600-900 sec. Data was analyzed with Octet software HT 10.0 by 1:1 global curve fit.

[0458] Mouse Study Designs: Female BALB/c mice (7-9 weeks old, 17-22 grams, N=20 per group) were immunized by intramuscular (IM) injection with two doses spaced 14 days apart (study day 0 and 14) of rS-WU1BV2373, rS-B.1.351BV2438 with 5 μg saponin-based Matrix-M™ adjuvant (Novavax, AB, Uppsala, SE) either alone, in combination, or as a heterologous prime/boost A placebo group was injected with vaccine formulation buffer as a negative control. Serum was collected for analysis on study days −1, 14, 21, and 32. Vaccinated and control animals were intranasally challenged with SARS-CoV-2 on study day 46.

[0459] To assess the cellular response mediated by Matrix-Msaponin adjuvant, groups of female BALB/c mice (N=8 per group) were immunized IM with the same regimens described above, with injections spaced 21 days apart. Spleens were collected 7 days after the second immunization (study day 28). A non-vaccinated group (N=5) served as a control.

[0460] Baboon Study Designs: Nine adult baboons (10-16 years of age at study initiation) were randomized into 4 groups of 2-3/group and immunized by IM injection with rS-WU1BV2373 at 1, 5, or 25 μg rS with 50 μg Matrix-Msaponin adjuvant. A separate group was immunized with 25 μg rS without adjuvant. Animals were vaccinated with 2 doses spaced 21 days apart in this primary immunization series. Immunogenicity results after the primary immunization series were previously described (15). Approximately one year later (45 weeks), all animals were boosted with one or two 3 μg doses of rS-B.1.351.BV2438 with 50 μg Matrix-Msaponin adjuvant. Sera and PBMCs were collected before and after the boost to measure antibody- and cell-mediated immune responses.

[0461] SARS-CoV-2 challenge in mice: Mice were anaesthetized by intraperitoneal injection 50 μL of a mix of xylazine (0.38 mg/mouse) and ketamine (1.3 mg/mouse) diluted in phosphate buffered saline (PBS). Mice were intranasally inoculated with either 7×104 pfu of B.1.117 or 1×105 pfu of B.1.351 strains of SARS-CoV-2 in 50 μL. Challenged mice were weighed on day of infection and daily for 4 days post infection. At days 2- and 4-days post infection, 5 mice were sacrificed from each vaccination and control group, and lungs were harvested to determine viral titer by a plaque assay and viral RNA levels by qRT-PCR.

[0462] SARS-CoV-2 Plaque Assay: SARS-CoV-2 lung titers were quantified by homogenizing harvested lungs in PBS (Quality Biological Inc.) using 1.0 mm glass beads (Sigma Aldrich) and a Beadruptor (Omini International Inc.). Homogenates were added to Vero E6 near confluent cultures and SARS-CoV-2 virus titers determined by counting plaque forming units (pfu) using a 6-point dilution curve.

[0463] Anti-SARS-CoV-2 Spike IgG by ELISA: An ELISA was used to determine anti-SARS-CoV-2 S IgG titers. Briefly, 96 well microtiter plates (ThermoFischer Scientific, Rochester, N.Y., USA) were coated with 1.0 μg mL-1 of SARS-CoV-2 spike protein. Plates were washed with PBS-T and blocked with TBS Startblock blocking buffer (ThermoFisher, Scientific). Mouse, baboon or human serum samples were serially diluted (10-2 to 10-8) and added to the blocked plates before incubation at room temperature for 2 hours. Following incubation, plates were washed with PBS-T and HRP-conjugated goat anti-mouse IgG or goat anti-human IgG (Southern Biotech, Birmingham, Ala., USA) added for 1 hour. Plates were washed with PBS-T and 3,3′,5,5′-tetramethylbenzidine peroxidase substrate (TMB, T0440-IL, Sigma, St Louis, Mo., USA) was added. Reactions were stopped with TMB stop solution (ScyTek Laboratories, Inc. Logan, Utah). Plates were read at OD 450 nm with a SpectraMax Plus plate reader (Molecular Devices, Sunnyvale, Calif., USA) and data analyzed with SoftMax software. EC50 values were calculated by 4-parameter fitting using SoftMax Pro 6.5.1 GxP software. Individual animal anti-SARS-CoV-2 S IgG titers and group geometric mean titers (GMT) and 95% confidence interval (±95% CI) were plotted GraphPad Prism 7.05 software.

[0464] hACE2 receptor blocking antibodies: Human ACE2 receptor blocking antibodies were determined by ELISA. Ninety-six well plates were coated with 1.0 μg, mL-1 SARS-CoV-2 S protein overnight at 4° C. After washing with PBS-T and blocking with StartingBlock (TBS) blocking buffer (ThermoFisher Scientific), serially diluted serum from groups of immunized mice, baboons or humans were added to coated wells and incubated for 1 hour at room temperature. After washing, 30 ng mL-1 of histidine-tagged hACE2 (Sino Biologics, Beijing, CHN) was added to wells for 1 hour at room temperature. After washing, HRP-conjugated anti-histidine IgG (Southern Biotech, Birmingham, Ala., USA) was added, followed by washing and addition of TMB substrate. Plates were read at OD 450 nm with a SpearaMax plus plate reader (Molecular Devices, Sunnyvale, Calif., USA) and data analyzed with SoftMax Pro 6.5.1 GxP software. The % Inhibition for each dilution for each sample was calculated using the following equation in the SoftMax Pro program: 100−[(MeanResults/ControlValue@PositiveControl)*100].

[0465] Serum dilution versus % Inhibition plot was generated and curve fitting was performed by 4 parameter logistic (4PL) curve fitting to data. Serum antibody titer at 50% inhibition (IC50) of hACE2 to SARS-COV-2 S protein (BV2373 or BV2438) was determined in the SoftMax Pro program.

[0466] SARS-CoV-2 Neutralization Titer by Plaque Reduction Neutralization Titer Assay (PRNT): PRNTs were processed as described previously (20). Briefly, serum samples were diluted in DMEM (Quality Biological) at an initial 1:40 dilution with 1:2 serial dilutions for a total of 11 dilutions. A no-sera control was included on every plate. SARS-CoV-2 was then added 1:1 to each dilution for a target of 50 PFU per plaque assay well and incubated at 37° C. (5.0% CO2) for 1 hr. Samples titers where then determined by plaque assay and neutralization titers determined as compared to the non-treatment control. A 4-parameter logistic curve was fit to these neutralization data in PRISM (GraphPad, San Diego, Calif.) and the dilution required to neutralize 50% of the virus (PRNT50) was calculated based on that curve fit.

[0467] Surface and intracellular cytokine staining: For surface staining, murine splenocytes were first incubated with an anti-CD16/32 antibody to block the Fc receptor. To characterize T follicular helper cells (Tfh), splenocytes were incubated with the following antibodies or dye: BV650-conjugated anti-CD3, APC-H7-conjugated anti-CD4, FITC-conjugated anti-CD8, Percp-cy5.5-conjugated anti-CXCR5, APC-conjugated anti-PD-1, Alexa Fluor 700-conjugated anti-CD19, PE-conjugated anti-CD49b (BD Biosciences, San Jose, Calif.) and the yellow LIVE/DEAD® dye (Life Technologies, NY). To stain germinal center (GC) B cells, splenocytes were labeled with FITC-conjugated anti-CD3, PerCP-Cy5.5-conjugated anti-B220, APC-conjugated anti-CD19, PE-cy7-conjugated anti-CD95, and BV421-conjugated anti-GL7 (BD Biosciences) and the yellow viability dye (LIVE/DEAD®) (Life Technologies, NY).

[0468] For intracellular cytokine staining (ICCS) of murine splenocytes, cells were cultured in a 96-well U-bottom plate at 2×106 cells per well. The cells were stimulated with rS-WU1BV2373 or rS-B.1.351BV2438 spike protein. The plate was incubated 6 h at 37° C. in the presence of BD GolgiPlug™ and BD GolgiStop™ (BD Biosciences) for the last 4 h of incubation. Cells were labeled with murine antibodies against CD3 (BV650), CD4 (APC-H7), CD8 (FITC), CD44 (Alexa Fluor 700), and CD62L (PE) (BD Pharmingen, CA) and the yellow LIVE/DEAD® dye. After fixation with Cytofix/Cytoperm (BD Biosciences), cells were incubated with PerCP-Cy5.5-conjugated anti-IFN-γ, BV421-conjugated anti-IL-2, PE-cy7-conjugated anti-TNF-α, and APC-conjugated anti-IL-4 (BD Biosciences). All stained samples were acquired using a LSR-Fortessa or a FACSymphony flow cytometer (Becton Dickinson, San Jose, Calif.) and the data were analyzed with FlowJo software version Xv10 (Tree Star Inc., Ashland, Oreg.).

[0469] For ICS of baboon PBMCs, PBMCs collected at the timepoints listed in FIG. 5A were stimulated as described above with rS-WU1BV2373 or rS-B.1.351BV2438. Cells were labeled with human/NHP antibodies BV650-conjugated anti-CD3, APC-H7-conjugated anti-CD4, FITC-conjugated anti-CD8, BV421-conjugated anti-IL-2, PerCP-Cy5.5-conjugated anti-IFN-γ, PE-cy7-conjugated anti-TNF-α, APC-conjugated anti-IL-15, BV711-conjugated anti-IL-13 (BD Biosciences), and the a yellow LIVE/DEAD® viability dye.

[0470] Enzyme Linked Immunosorbent Assay (ELISA): Murine IFN-γ and IL-5 ELISpot assays were performed following the manufacturer's procedures for mouse IFN-γ and IL-5 ELISpot kits (3321-2H and 3321-2A, Mabtech, Cincinnati, Ohio). Briefly, 4×105 splenocytes in a volume of 200 μL were stimulated with rS-WU1BV2373 or rS-B.1.351BV2438 in plates that were pre-coated with anti-IFN-γ or anti-IL-5 antibodies. Detection secondary antibodies were clone RS-6A2 IFN-γ and clone TRFK4. Each stimulation condition was carried out in triplicate. Assay plates were incubated 24-48 h at 37° C. in a 5% CO2 incubator and developed using BD ELISpot AEC substrate set (BD Biosciences, San Diego, Calif.). Spots were counted and analyzed using an ELISpot reader and ImmunoSpot software v6 (Cellular Technology, Ltd., Shaker Heights, Ohio). The number of IFN-γ- or IL-5-secreting cells was obtained by subtracting the background number in the medium controls. Data shown in the graph are the average of triplicate wells.

[0471] Similarly, baboon IFN-γ and IL-4 assays were carried out using NHP IFN-γ and Human IL-4 assay kits from Mabtech. For IFN-γ, coating antibody human IFN-γ 3420-2H and detection antibody clone 7-B6-1 were used. For IL-4, coating antibody human IL-43410-2H (clone IL4-I) and detection antibody clone IL4-II were used. Assays were performed in triplicate.

[0472] Statistical Analysis: Statistical analyses were performed with GraphPad Prism 8.0 software (La Jolla, Calif.). Serum antibody titers were plotted for individual animals and the geometric mean titer (GMT) and 95% confidence interval (95% CI) or the means±SEM as indicated in the figure. Ordinary one-way ANOVA with Tukey's multiple comparisons post-hoc test was performed on log 10-transformed data to evaluate statistical significance of differences among groups. P-values≤0.05 were considered as statistically significant.

[0473] Biophysical Properties, Structure, and Function of BV2438 antigen: Purified BV2438, when reduced and subjected to SDS-PAGE, migrated with the expected molecular weight of approximately 170 kDa (FIG. 52A). The thermal stability of BV2438 was compared to that of BV2373 by differential scanning calorimetry (DSC); the main peak of the BV2438 showed a 4° C. increase in thermal transition temperature (Tₘₐₓ) and 1.3-fold higher enthalpy of transition (ΔHCal) compared to the prototype BV2373 protein, indicating increased stability of BV2438 (FIG. 52B, Table 7). Transmission electron microscopy (TEM) combined with two rounds of two-dimensional (2D) class averaging of 16,049 particles were used to confirm the ultrastructure of BV2438. High magnification (92,000× and 150,000×) TEM images revealed a lightbulb-shaped particle appearance with a 15 nm length and an 11 nm width, which was consistent with the profusion form of the SARS-CoV-2 spike trimer (PDB ID 6VXX; FIG. 52C). This is consistent with what we have previously observed for the prototype BV2373 protein.

[0474] To confirm the functional properties of the variant spike protein construct BV2438, binding of this rS protein to the hACE2 receptor was determined using bio-layer interferometry (BLT) as previously described. BV2438 was found to bind tightly and stably to hACE2, with an association constant (Ka) of 3.94×10⁴, representing a 3.6-fold greater association to hACE2 compared to the prototype protein BV2373 (Ka=1.08×10⁴). Dissociation constants of these two proteins were essentially identical (1.46×10⁻⁷ and 1.56×10⁻⁷ for BV2438 and BV2373, respectively). We additionally assessed BV2438 binding to hACE2 with an ELISA as previously described. In this assay, BV2438 attained 50% saturation of hACE2 at a slightly lower concentration (EC₅₀=8.0 ng/mL) than the prototype construct BV2373 (EC₅₀=9.4 ng/mL), confirming that BV2438 exhibited a slightly higher affinity for hACE2 compared to that of BV2373 (Table 7).

TABLE 7
Thermostability and hACE2 binding of
SARS-CoV-2 recombinant spike proteins

| | Differential | | hACE2 binding | | |
|---|---|---|---|---|---|
| | Scanning | | hACE2 Binding | | |
| | Calorimetry | | Kinetics by Bio-layer | | hACE2 |
| | (DSC) | | Interferometry | | ELISA |
| SARS-CoV-2 | Tₘₐₓ | ΔHcal | Kₐ | K_{dis} | (EC₅₀, |
| rS proteins | (° C.) | (kJ mol⁻¹) | (1/Ms) | (1/s) | ng/mL) |
| BV2438 | 67.24 | 725.1 | 3.94 × 10⁴ | 1.46 × 10⁻⁷ | 8.0 |
| BV2373 | 63.21 | 546.0 | 1.08 × 10⁴ | 1.56 × 10⁻⁷ | 9.4 |

Tₘₐₓ, melting temperature;
Kₐ, binding constant;
K_{dis}, dissociation constant;
EC₅₀, half-maximal binding.

[0475] BV2438 Immunogenicity in Mice: We assessed the antibody- and cell-mediated immunogenicity of BV2438 and BV2373 formulated with saponin adjuvant. To assess antibody-mediated immunogenicity, groups of mice (n=20) were immunized with either BV2373 or BV2438 as both prime and boost, with BV2373 as the prime and BV2438 as the boost, or with both vaccines combined in a bivalent formulation for the prime and boost vaccination. A placebo group received vaccine formulation buffer as a negative control. In monovalent immunization groups, 1 μg of rS and 5 μg of saponin adjuvant was intramuscularly injected at Days 0 and 14. For bivalent immunization, 1 μg of each rS construct was administered at each immunization, for a total of 2 μg rS, with 5 μg of saponin adjuvant. The study design is shown in FIG. 53. Mice immunized with either of the 4 vaccine regimens displayed elevated antibody titers against both the B.2 Spike and B.1.351. Spike by ELISA at day 21 post vaccination. Monovalent vaccination with either BV2373 or BV2438 produced significantly lower anti-S (WU1) IgG titers than bivalent vaccination or heterologous vaccination, although neither reduced IgG titers more than 2-fold (FIG. 54A, FIG. 54B). Conversely, immunization with BV2373 alone resulted in significantly lower titers against B.1.351 Spike compared to all other immunization regimens; immunization with monovalent BV2438 or bivalent rS resulted in anti-B.1.351 spike IgG titers that were the highest among regimens tested, with no significant difference between these regimens (FIG. 54A, FIG. 54B). Animals in the placebo group exhibited undetectable anti-B.2 Spike and anti-B.1.351 spike IgG titers as expected.

[0476] The ability of serum from mice to inhibit Spike to hACE2 binding was also assessed. All immunization regimens resulted in the production of antibodies that blocked hACE2 binding to a CoV Spike polypeptide with no significant difference between any groups at Day 21 (FIG. 54C, FIG. 54D). Yet immunization with BV2373 alone resulted in significantly lower serum titers capable of disrupting binding between B.1.351 spike and hACE2; titers in the BV2373 alone immunization group were 4.6-fold lower than titers in the BV2438 alone immunization group (p<0.0001) and 3.1-fold lower than titers in the group that received bivalent rS (p<0.0001).

[0477] We next assessed neutralizing antibody titers among the different vaccination regimens. Sera collected from vaccinated animals at day 32 post vaccination were assessed using SARS-CoV-2/WA1, SARS-CoV-2/B.1.1.7 and SARS-CoV-2/B.1.351 strains in a plaque reduction neutralizing titer assay (PRNT₅₀). Sera from the monovalent BV2373 group displayed similar neutralizing antibody titers to each of the 3 virus strains. Sera from mice immunized with monovalent BV2438 produced elevated neutralizing antibody titers to the B.1.351 and the B.1.1.7 strain compared to the B.2 strain (FIG. 54E). The heterologous vaccine group produced similar elevated neutralizing antibody titers to the B.1.351 and the B.1.17 strain compared to the B.2 strain, as did the bivalent BV2373/BV2438 vaccination regimen.

[0478] BV2438 Protection against SARS-CoV-2 in BALB/c mice: Mice vaccinated as described in FIG. 53 were evaluated for their ability to produce protective immunity against challenge with either B.1.1.7 or B.1.351. While the SARS-CoV-2/Wuhan 1 (B.2) strain does not replicate in wild type mice, the B.1.1.7 and B.1.351 strains have a 501Y mutation in the Spike ORF allowing for Spike protein to bind to mouse ACE2 and enter cells. At day 46 post vaccination, mice were intranasally inoculated with either 7×10⁴ PFU of B.1.1.7 (n=10 mice per group) or 1×10⁵ PFU of B.1.351 (n=10 mice per group). Mice were weighed daily throughout the post-challenge period, and at 2 and 4 days post infection (Study Days 48 and 50), 5 mice per group were euthanized by isoflurane inhalation. Lungs of each mouse were then assessed for viral load by plaque formation assay and viral RNA by RT-PCR. Placebo BALB/c mice infected with B.1.1.7 did not lose weight and there was no observed weight loss in any vaccinated group that was infected with this SARS-CoV-2 strain. For B.1.351 infected mice, 20% weight loss was observed in the placebo vaccination group by day 4 post infection with B.1.351 (FIG. 55A, FIG. 55B). All mice vaccinated with either regimen were protected from weight loss after infection with B.1.351, demonstrating a clinical correlate of protection in this model.

[0479] At day 2 post infection, B.1.1.7 infected mice in the placebo group exhibited 4×10⁴ pfu/g lung, which dropped to undetectable levels by day 4 post infection in the placebo vaccinated group. Upon immunization with any BV2373 or BV2438 regimen, there was no detectable live virus at day 2 or day 4 post infection, demonstrating a greater than 5-log reduction in viral load and protection from infection following vaccination (FIG. 55C, FIG. 55D). At day 2 post infection, B.1.351 infected mice in the sham vaccinated group exhibited 8×10⁸ pfu/g lung, which dropped to 2×10⁵ pfu/g lung by day 4 post infection. Upon immunization with any rS regimen, there was no detectable live virus at day 2 or day 4 post infection in the B.1.351 infected mice. This demonstrates a dramatic reduction in virus titer, with >5 log reduction in viral load by day 2 post infection from the sham vaccinated mice (FIG. 55C, FIG. 55D). Lung RNA was also assayed for subgenomic (sgRNA) SARS-CoV-2 mRNA production after challenge. Relative to levels in the respective Placebo groups, we found >99% reduction in lung sgRNA levels in immunized mice at day 2 and day 4 after infection with both strains (FIG. 55E, FIG. 55F).

[0480] These results confirm that BV2373 and BV2438 formulated with saponin adjuvant and administered as monovalent, bivalent, or heterologous regimens confer protection against both strains of SARS-CoV-2, B.1.1.7 and B.1.351, in mice. Together with the reduction in weight loss, high neutralizing antibody titers, and elimination of viral replication in the lungs of mice, we demonstrate a highly protective vaccine response by the variant Spike targeted vaccine.

[0481] Cell-mediated immunogenicity of BV2438 in Mice: Groups of BALB/c mice (n=8/group) were immunized with the same BV2373 or BV2438 regimens mentioned above, but at a 21-day interval (FIG. 56A). A negative control group (n=4) was injected with vaccine formulation buffer. Spleens were harvested on study day 28, 7 days after the boost immunization. Splenocytes were collected and subjected to ELISpot and intracellular cytokine staining (ICS) to examine cytokine secretion upon stimulation with BV2373 or BV2438. Enzyme linked immunosorbent assay (ELISA) showed greater numbers of IFN-γ producing cells compared to the number of IL-5 producing cells upon all vaccination regimens, signifying a Th1-skewed response (FIGS. 56B-D). Upon stimulation with either rS, strong Th1 responses were observed by ICS as measured by the presence of CD4+ T cells expressing IFN-γ, IL-2, or TNF-α, and multifunctional CD4+ T cells expressing all 3 cytokines (FIG. 56E, FIGS. 57A-E). CD4+ T cells that expressed the Th2 cytokine IL-4 but were negative for IL-2 and TNF-α were also present, but at a lower proportion than that observed for Th1 cytokines (FIGS. 57A-E). No significant differences in cytokine-positive cell number were observed among vaccination groups for any cytokine tested upon stimulation with either BV2373 or BV2438.

[0482] T follicular helper cells (CSCR5+PD-1+CD4+) tended to represent a greater percentage of CD4+ T cells, though no statistically significant elevation was observed in vaccinated animals compared to placebo animals (FIG. 56F). Similarly, germinal center formation was evaluated by determining the percentage of GL7+CD95+ cells among CD19+ B cells using flow cytometry, and though a tendency toward higher percentage of germinal center B cells was observed in vaccinated groups compared to the placebo group, only animals immunized with the monovalent BV2438 regimen showed a significantly higher proportion (p=0.049 compared to placebo; FIG. 56G).

[0483] Anamnestic response induced by boosting with BV2373 one year after primary immunization with BV2373 in baboons: A small cohort of baboons (n=9 total) were subjected to a primary immunization series with BV2373 (either 1 μg, 5 μg, or 25 μg rS with 50 μg saponin adjuvant, or unadjuvanted 25 μg rS). Approximately one year later, all animals were boosted with one or two doses of 3 μg BV2438 with 50 μg saponin adjuvant to examine the resulting immune responses (FIG. 58A). Seven days after the first BV2438 boost, animals that had originally received adjuvanted BV2373 exhibited a strong anamnestic response as exhibited by levels of anti-S (WU1) IgG titers higher than that originally observed at peak immune response during the primary immunization series (FIG. 58B). This response did not seem to be further bolstered by a second booster dose of BV2438, though the small sample sizes utilized in this study prohibit a meaningful quantitative analysis. Animals that received unadjuvanted BV2373 during the primary immunization series exhibited a weaker response to boosting with BV2438, though still exhibited elevated anti-S (WU1) IgG response. The BV2438 boost elicited comparable antibody titers against BV2373 and BV2438, with animals that originally received unadjuvanted BV2373 exhibiting a weaker response (FIG. 58C, FIG. 58D).

[0484] Serum antibody titers capable of disrupting the interaction between the wild-type CoV S protein (SEQ ID NO: 2) or B.1.351 rS and hACE2 were also evaluated at before boost, and 7, 21, 35, and 89 days after the boost with 1 or 2 doses of BV2438. Similarly to what was observed for anti-S IgG titers, animals that had received adjuvanted vaccine during the primary immunization series exhibited a strong hACE2-inhibiting antibody response 7 days after the BV2438 boost, despite having undetectable titers before the boost. Titers were slightly higher for BV2373-hACE2 blocking antibodies compared to levels of BV2438-hACE2 blocking antibodies, though the small sample size prohibits a meaningful quantitative analysis. Animals that had received unadjuvanted vaccine during the primary immunization series exhibited lower hACE2 blocking titers after the BV2438 boost (FIG. 58E).

[0485] Neutralizing antibody titers were analyzed by live virus microneutralization assays by testing sera for the ability to neutralize WA1, B.1.351 and B.1.1.7. Sera collected before the BV2438 boost had undetectable neutralizing antibody levels against all these viruses. By 7 days post vaccination, high titer antibody that neutralized all 3 strains was detected and this antibody response stayed high through 35 days post vaccination. Animals immunized with unadjuvanted BV2373 in the primary series displayed significantly lower antibody levels with a much broader range of neutralization titers (FIG. 58F). Together, these data demonstrate a robust durable antibody response even 1 year after the primary vaccination series.

[0486] Multifunctional T cells expressing 3 Th1 cytokines were also observed 7 days after the first BV2438 booster dose in baboons, and these responses were maintained at 35 days after the first booster dose (FIG. 58G and FIGS. 59A-G).

[0487] Neutralization of SARS-CoV-2 Variants by Sera from BV2373 Vaccinated Adults: A vaccine containing BV2373 and saponin adjuvant is currently in clinical trials globally, including in locations where B.1.1.7 and B.1.351 are prevalent. We assessed the capacity of sera from individuals in these trials to neutralize USA-WA1, B.1.1.7 and B.1.351. Microneutralization assays were performed with a PRNT₅₀ readout (FIG. 60A, FIG. 60B). Thirty randomly selected serum samples from clinical trial participants after their second dose of the vaccine were assayed. When comparing WA1 vs B.1.1.7, there was no change in neutralizing activity across the majority of the serum samples; only 1 sample had a statistically significant change in neutralizing antibody titers against B.1.1.7. The WA1 vs B.1.351 neutralization titers showed increased range of neutralization titers with five out of 30 samples showing reduced neutralization 1 standard deviation away from the mean in the PRNT₅₀ assay. This data demonstrates a reduced neutralization of B.1.351 in a small percentage of vaccinees receiving BV2373 and saponin adjuvant compared to B.1.1.7.

[0488] Discussion: We have shown that a full-length, stabilized prefusion SARS-CoV-2 spike glycoprotein vaccine using the B.1.351 Spike variant adjuvanted by saponin adjuvant can induce high levels of functional immunity and protects mice against both B.1.1.7 and B.1.351 SARS-CoV-2 strains. Immunizing mice or non-human primates with BV2438 induced anti-S antibodies, hACE2-receptor inhibiting antibodies, and SARS-CoV-2 neutralizing antibodies. In addition, the BV2438 vaccine induced CD4⁺ T cell responses, induced germinal center formation and provided protection against B.1.351 and B.1.1.7 challenge.

[0489] In mice, the antibodies produced after vaccination with the B.1.351 variant-directed vaccine were able to inhibit binding between hACE2 and variant spike or ancestral spike to the same degree, indicating that this variant-directed vaccine could efficiently protect “backward” against ancestral SARS-CoV-2 strains.

[0490] Analysis of human vaccine sera from our trials demonstrates a robust antibody response and minimal loss of neutralization. We observed that B.1.351 virus does not significantly reduce neutralization compared to B.1.1.7 and WA1, even though there is evidence of breakthrough infections in the WA.1 trial participants in South Africa. All breakthrough infections were B.1.351. Booster vaccinations containing a single or multiple variant rS vaccines will thus increase antibody levels as well as broaden coverage to variants as shown in this work.

### Example 11

### BV2373 and Saponin Adjuvant Induce Protective Immune Responses Against Heterogeneous SARS-CoV-2 Strains After a Single Boost Dose

[0491] Participants: Healthy male and female participants ≥18 to ≤84 years of age were recruited for enrollment in this study. Participants were eligible if they had a body mass index of 17 to 35 kg/m², were able to provide informed consent prior to enrollment, and (for female participants) agreed to remain heterosexually inactive or use approved forms of contraception. Participants with a history of severe acute respiratory syndrome (SARS) or a confirmed diagnosis of COVID-19, serious chronic medical conditions (e.g, diabetes mellitus, congestive heart failure, autoimmune conditions, malignancy), or that were currently being assessed for an undiagnosed illness which may lead to a new diagnosis, were excluded from the study. Pregnant or breastfeeding females were also excluded.

[0492] Randomization: Patients were randomly assigned to five groups. Of the five treatment groups, one was a placebo control (Group A) and two were active vaccine groups that were considered for additional vaccination with a booster (Group B and Group C). After approximately 6 months, consenting participants who had been randomized to receive a primary vaccination series of either two doses of BV2373 (5 μg) and saponin adjuvant (50 μg) on Day 0 and Day 21 (Group B) or one dose of BV2373 (5 μg) and saponin adjuvant (50 μg) on Day 0 and placebo on Day 21 (Group C) were re-randomized 1:1 to receive either a single booster dose of BV2373 and saponin adjuvant at the same dose level (Groups B2 and C2) or placebo (Groups B1 or C1) at Day 189. Group B participants are the main focus of this Example.

[0493] Purpose and Methods: We conducted a phase 2, randomized, observer-blinded, placebo-controlled trial in healthy adults aged 18 to 84 who received three intramuscular 5 μg doses of BV2373 and 50 μg saponin adjuvant (Fraction A and Fraction C iscom matrix, also referred to as MATRIX-M™ in this example) or placebo (1:1). The first and second dose were administered 21 days apart. The first and second dose are referred to as the “primary vaccination series.” The third dose (“boost” dose) was administered about 6 months following the primary vaccination series. The injection volume of all three doses was 0.5 mL. Safety and immunogenicity parameters were assessed, including assays for IgG, MN₅₀, and hACE2 inhibition against the ancestral SARS-CoV-2 strain and select variants (B.1.351 [Beta], B.1.1.7 [Alpha], B.1.617.2 [Delta]).

[0494] Participants utilized an electronic diary to record reactogenicity on the day of vaccination and for an additional 6 days thereafter. Blood samples for immunogenicity analysis were collected 28 days after receipt of the booster, with safety follow-up also being performed at this time. Measures of immune response included assays for serum immunoglobulin G (IgG) antibodies, neutralizing antibody activity (microneutralization assay at an inhibitory concentration >50% [MN₅₀]), and human angiotensin-converting enzyme 2 (hACE2) receptor binding inhibition. Serum IgG antibody levels specific for the SARS-CoV-2 rS protein antigen were detected using a qualified IgG enzyme linked immunosorbent assay (ELISA). Neutralizing antibodies specific for SARS-CoV-2 virus were measured using a qualified wild-type virus MN assay. Serum IgG and MN₅₀ assay data were collected for both the ancestral and Beta variant SARS-CoV-2 strains. A fit-for-purpose functional hACE2 inhibition assay and an anti-rS (anti-recombinant spike) IgG activity assay were both used to analyze responses against the ancestral, B.1.351 (Beta), B.1.1.7 (Alpha), and B.1.617.2 (Delta) variant strains of SARS-CoV-2.

[0495] Safety outcomes included participant-reported reactogenicity events for 7 days following the booster, as well as unsolicited adverse events occurring through 28 days post-booster. Booster reactogenicity was documented separately by solicited local and systemic adverse events. Unsolicited adverse events from booster vaccination to 28 days post-booster were recorded. Data were also collected on whether an adverse event was serious, related to vaccination, related to COVID-19, a potentially immune-mediated medical condition (PIMMC), or lead to discontinuation or an unscheduled visit to a healthcare practitioner. Participant samples for immunogenicity analyses were collected immediately prior to and 28 days after the booster.

[0496] Statistics: Analyses included safety and immunogenicity data from participants in Group B obtained during and after their primary vaccination series (Day 0, Day 21, Day 35, Day 105, and Day 189) for comparison with data collected from Group B2 28 days following their receipt of the booster dose (Day 217). Results were also analyzed by participant age group: ≥18 to ≤84 years of age, ≥18 to ≤59 years of age, and ≥60 to ≤84 years of age.

[0497] The safety analysis included all participants who received a single booster injection of BV2373 and saponin adjuvant (Group B2) or placebo (Group B1). Safety analyses were presented as numbers and percentages of participants with solicited local and systemic adverse events analyzed through 7 days after each vaccination and unsolicited adverse events through 28 days following the booster.

[0498] Results: A total of 1610 participants were screened. All but three participants randomized to Group B (n=2.57) received both doses of BV2373 and saponin adjuvant in their primary vaccination series and were considered for investigation of a single booster dose at the same dose level (FIG. 63). Re-randomization of Group B participants took place at Day 189, with 210 consenting participants assigned 1:1 to receive a single booster of BV2373 and saponin adjuvant in Group B2 (n=104) or placebo in Group B1 (n=106). In Group B2, all but one participant received active vaccine as a booster. All but six participants in Group B1 received placebo as a booster; of the remaining six participants, four did not receive any booster (of which, one was included in Group B1 for safety due to an ongoing adverse event) and two received active vaccine in error as a booster and were assessed for safety in Group B2. All but one participant in Group A received placebo for all three doses, with the remaining participant receiving active vaccine as a booster dose.

[0499] Demographics and baseline characteristics were generally balanced between the active (Group B2) and placebo (Group B1) booster groups (Table 8), except for a higher proportion of female participants in Group B1 (58%) than Group B2 (45%). Across Groups A, B1, and B2, the median age was approximately 57 years and 45% of participants were ≥60 to ≤84years of age. Most participants were White (87%) and not Hispanic or Latino (95%), Baseline SARS-CoV-2 serostatus was predominantly negative (98%).

[0500] Safety reporting of solicited local and systemic reactogenicity events showed an increasing trend across all three doses of BV2373 and saponin adjuvant (FIGS. 64A-B). Following the booster, participants in Group B2 reported an incidence rate for any local reaction (tenderness, pain, swelling, and erythema) of 82.5% (13.4%≥Grade 3) compared to 70.0% (5.2%≥Grade 3) following the primary vaccination series. Grade 4 local reactions were rare, with two events (pain and tenderness) reported by one participant in Group B2 compared with no participants following the primary vaccination series. Following the booster, local reactions were short-lived with a median duration of 2.0 days for all events except erythema (2.5 days). Local reactions were also short-lived following the primary vaccination series, with median durations of 2.0 days for pain and tenderness and 1.0 day for erythema and swelling.

[0501] Systemic reactions showed a similar pattern with an incidence rate for any event (fatigue, headache, muscle pain, malaise, joint pain, nausea/vomiting, and fever) of 76.5% (15.3%≥Grade 3), compared to 52.8% (5.6%≥Grade 3), following the primary vaccination series. Grade 4 systemic reactions were rare, with three events reported by one participant in Group B2 (headache, malaise, and muscle pain) compared with no participants following the primary vaccination series. Following the booster, systemic reactions were transient in nature with a median duration of 1.0 day for all events except muscle pain which had a duration of 2.0 days. All systemic reactions were also short-lived following the primary vaccination series, with a median duration of 1.0 day for all events.

[0502] Local and systemic reactogenicity events were less frequent and less severe in older adults (≥60 to ≤84 years of age)) when compared to younger adults (≥18 to ≤59 years of age) following either the primary vaccination series or booster dose. In the younger cohort, post-booster local and systemic reactions were reported in 84.9% (18.9%≥Grade 3) and 84.9% (26.4%≥Grade 3) of participants, respectively, versus 79.5% (6.8%≥Grade 3) and 66.7% (2.2%≥Grade 3) of participants, respectively, in the older cohort.

[0503] Unsolicited adverse events were summarized across the active-boosted participants (Group B2), placebo-boosted participants (Group B1), and participants receiving three doses of placebo throughout the study (Group A). Through 28 days after the booster, participants who initially received active vaccine for their primary vaccination series (Groups B2 and B1) experienced a higher incidence of unsolicited adverse events than those who received only placebo (Group A), with 12.4%, 12.7%, and 11.0% of participants reporting such events, respectively. A similar trend was seen for unsolicited severe adverse events (5.7%, 3.9%, and 2.4%, respectively). Other types of AEs reported included medically attended. AEs (events requiring a healthcare visit; MAAEs), potential immune-mediated medical conditions (PIMMCs), events relevant to COVID 19, and serious adverse events (SAEs).

[0504] Overall, MAAEs occurred with a slightly higher frequency in active boosted participants across the three groups (30.5%, 26.1%, and 23.2% for Groups B2, B1, and A, respectively), with related events reported in few participants (1.9%, 0%, and 1.2%, respectively). Events considered PIMMCs were rare across the study, with one participant in Group B2 and Group A reporting a single event each; both events were assessed as not related to study treatment. No participant reported an as adverse event related to COVID-19.

[0505] SAEs were also infrequent across the study, occurring in 5.7%, 3.3%, and 1.6% of participants in Groups B2, B1, and A, respectively, with all events assessed as not related to study treatment.

[0506] Evaluation of SAEs for Group B2 and B1 participants did not show a relationship of with active boosting, as SAEs occurred in 0%, 4.8%, and 1.0% of participants in Group B2 and 0%, 2.0%, and 2.0% of participants in Group B1 following Dose 1, Dose 2, and the booster, respectively.

[0507] Declines in Group B IgG and MN50 geometric mean titers (GMTs) were observed following the primary vaccination series (Day 35) through Day 189 (43,905 units [EU] to 6,064 EU for IgG and 1,470 to 63 for MN50, respectively). Twenty-eight days following the booster (Day 217), IgG and MN50 titers increased robustly compared to both the pre-booster titers and to the Day 35 titers produced by the primary series (FIG. 65, FIG. 66).

[0508] For the ancestral SARS-CoV-2 strain, serum IgG GMTs increased ˜4.7-fold from 43,905 EU following the primary vaccination series (Day 35) to 204,367 EU following the booster (Day 217). Higher fold increases after boosting were seen in older adults (5.1-fold) compared to younger adults (4.1-fold). Similarly, MN50 assay GMTs specific to the ancestral SARS-CoV-2 strain increased ˜4.1-fold from 1,470 to 6,023 over the same respective time points with increases in older and younger adults of 4.0-fold and 3.8-fold, respectively.

[0509] For the Beta variant, IgG GMTs increased from 4,317 EU at Day 189 pre-booster to 175,190 EU at Day 217 reflecting a post-booster increase of ˜40.6-fold. These titers were 4-fold higher than those observed at Day 35 for the ancestral strain (GMT 175,190 EU vs 43,905 EU). Beta variant MN50 assay data showed a similar fold increase in titers from pre-booster (Day 189) to post-booster (Day 217) of ˜50.1-fold (GMT 13 vs 661), though titers were lower than those seen for the ancestral strain at Day 35 (GMT 661 vs 1,470). (Table 9, Table 10).

[0510] Two assays were developed to assess immune responses against additional SARS-CoV-2 variants using participant sera from Day 35 (Group B) and Day 217 (Group B2). A functional hACE2 inhibition assay was utilized to compare activity against the ancestral strain (a SARS-CoV-2 virus comprising a CoV S polypeptide with a D614G mutation compared to SEQ ID NO: 1) and the Delta, Beta, and Alpha variants of SARS-CoV-2. In respective order, 6-fold, 6.6-fold, 10.8-fold, 8.1 fold, and 19.9-fold increases in hACE2 inhibition titers were observed (Table 12A, Table 12B, FIGS. 62A-B). A second assay comparing anti-rS IgG activity across the same strains of SARS-CoV-2 found that 5.4-fold (Ancestral), 11.1-fold (Delta), 6.5-fold (Beta), 9.7-fold (Alpha) higher titers were observed after the booster (Table 11A, Table 11B, FIGS. 61A-B).

[0511] Results: Administration of a single booster dose of the vaccine approximately 6 months following the primary two-dose series resulted in an incremental increase in reactogenicity events along with significantly enhanced immunogenicity.

[0512] Prior to boosting at Day 189, anti-SARS-CoV-2 antibody titers in immunized participants were markedly lower when compared with samples taken after the primary vaccination series at Day 35 (Group B IgG and MN₅₀ GMTs lowered from 43,905 EU to 6,064 EU and 1,470 to 63, respectively). The presence of neutralizing antibodies are strongly indicative of protection against symptomatic COVID-19.

[0513] In the present study, antibody responses to the booster were assessed for the ancestral vaccine strain as well as for more recent SARS-CoV-2 variants including Alpha, Beta, and Delta. For the ancestral strain, IgG titers at Day 217 were approximately 34-fold higher than the pre-booster Day 189 titers while neutralizing antibody titers increased approximately 96-fold after the booster. Both IgG and MN titers after the booster were >4-fold higher than those seen after the primary two-dose series at Day 35, which is notable as the Day 35 titers corresponded to high levels of clinical efficacy in both a UK phase 3 study (89.7%) as well as in a USA/Mexico phase 3 study (90.4%).). When broken down by age group, higher fold increases were seen for older adults (≥60 to ≤84 years of age) compared to younger adults (≥18 to ≤59 years of age). This finding suggests that a booster dose may have added benefit in older adults as their antibody responses following the primary two-dose vaccination series were lower n those seen in younger adults.

[0514] For the Beta variant, 40- to 50-fold increases in IgG and MN antibody titers were seen following the booster and IgG titers were approximately 4-fold higher than those seen for the ancestral strain after the primary vaccination series. Unlike the observation with IgG, MN₅₀GMTs for the Beta variant were lower following the booster than those for the ancestral strain following the primary vaccination series (GMT 661 vs 1,470) in alignment with the known decreased neutralizing responses for this variant.

[0515] For the Delta variant of SARS-CoV-2, 6.6-fold increases in functional hACE2 inhibition titers were seen when comparing the post-booster Day 217 titers to the Day 35 titers. Anti-rS IgG activity compared at these same time points found 9.7-fold (Delta) higher titers associated with the booster.

[0516] The incidence of both local and systemic reactogenicity was higher following the 6-month booster dose compared to the previous doses reflecting the increased immunogenicity seen with the third dose. However, the incidence of Grade 3 or higher events remained relatively low with only fatigue (12.2%) being recorded by greater 10% of participants. In total, five Grade 4 (potentially life threatening) solicited local and systemic adverse events were reported. All five of these events (pain, tenderness, headache, malaise, and muscle pain) were reported by the same participant in the active booster group concurrently with an adverse event of drug hypersensitivity related to the vaccine. The drug hypersensitivity event was assessed as mild in severity. The participant did not seek any medical attention for this event, and all the participant's symptoms resolved over a period of 6 days.

[0517] Table 13 shows the geometric mean titer for neutralization of 99% of a SARS-CoV-2 virus having a D614G mutation compared to SEQ ID NO: 1 or the SARS-CoV-2 delta variant. FIG. 67 shows the neutralizing antibody 99 (neut99) values for the immunogenic composition comprising BV2373 and saponin adjuvant of Example 11 against the SARS-CoV-2 strain containing a D614G mutation and the B.1.617.2 (delta variant).

[0518] Overall, a single booster dose of BV2373 and saponin adjuvant administered approximately 6 months after the primary series induced a substantial increase in humoral antibodies that was >4-fold higher than antibody titers associated with high levels of efficacy in two phase 3 studies while also displaying an acceptable safety profile. These findings support use of the vaccine in booster programs.

TABLE 8
Demographic and Baseline Characteristics
for Groups A, B1, and B2

| | Group A | | Group B1 | | Group B2 | |
|---|---|---|---|---|---|---|
| Parameter | N = 172 | | N = 102 | | N = 105 | |
| Age (years) | | | | | | |
| Mean (SD) | 51.9 | (17.23) | 52.0 | (16.99) | 51.7 | (17.12) |
| Median | 56.0 | | 57.5 | | 58.0 | |
| Min, Max | 18, 83 | | 19, 80 | | 19, 82 | |
| Age group (n [%]) | | | | | | |
| 18 to 59 years | 95 | (55.2) | 55 | (53.9) | 57 | (54.3) |
| 60 to 84 years | 77 | (44.8) | 47 | (46.1) | 48 | (45.7) |
| Sex (n [%]) | | | | | | |
| Male | 100 | (58.1) | 43 | (42.2) | 58 | (55.2) |
| Female | 72 | (41.9) | 59 | (57.8) | 47 | (44.8) |
| Race (n [%]) | | | | | | |
| White | 151 | (87.8) | 86 | (84.3) | 93 | (88.6) |
| Black or African | 2 | (1.2) | 3 | (2.9) | 3 | (2.9) |
| American | | | | | | |
| Asian | 15 | (8.7) | 10 | (9.8) | 7 | (6.7) |
| American Indian or | 2 | (1.2) | 1 | (1.0) | 1 | (1.0) |
| Alaska Native | | | | | | |
| Multiple | 2 | (1.2) | 1 | (1.0) | 1 | (1.0) |
| Missing | 0 | | 1 | (1.0) | 0 | |
| Ethnicity (n [%]) | | | | | | |
| Hispanic or Latino | 11 | (6.4) | 3 | (2.9) | 1 | (1.0) |
| Not Hispanic or Latino | 161 | (93.6) | 97 | (95.1) | 104 | (99.0) |
| Unknown | 0 | | 2 | (2.0) | 0 | |
| Baseline BMI (kg/m2) | | | | | | |
| Mean (SD) | 27.29 | (4.207) | 26.69 | (4.060) | 27.43 | (4.040) |
| Median | 27.40 | | 26.50 | | 27.10 | |
| Min, Max | 17.7, 35.0 | | 17.3, 34.9 | | 18.2, 34.9 | |
| Baseline SARS-CoV-2 | | | | | | |
| status (n [%]) | | | | | | |
| Negative | 169 | (98.3) | 101 | (99.0) | 102 | (97.1) |
| Positive | 2 | (1.2) | 1 | (1.0) | 3 | (2.9) |

| | | | | |
|---|---|---|---|---|
| Indeterminate | 1 | (0.6) | 0 | 0 |

BMI = body mass index;
SARS-CoV-2 = severe acute respiratory syndrome coronavirus 2;
SD = standard deviation
A = Placebo on Day 0, Day 21, and Day 189
B1 = 5 μg BV2373 + 50 μg saponin adjuvant on Day 0 and Day 21 and placebo on Day 189
B2 = 5 μg BV2373 + 50 μg saponin adjuvant on Day 0, Day 21, and Day 189
1 Participants in the Safety Analysis Set are counted according to the treatment received to accommodate for treatment errors.

TABLE 9
Serum IgG Geometric Mean Titers after Primary and Booster Vaccination for the Ancestral and Beta
Variant SARS-CoV-2 Strains by Study Day for Participants Receiving BV2373 and Saponin Adjuvant

| | Serum IgG GMT (EU [95% CI]) | | | | |
|---|---|---|---|---|---|
| | Day 35 | Day 189 | Day 217 | Day 189 | Day 217 |
| Age Group | Ancestral Strain | Ancestral Strain | Ancestral Strain | Beta variant | Beta variant |
| All Participants, | 43,905 | 6,064 | 204,367 | 4,317 | 175,190 |
| 18 to 84 years | (37,500, 51,403) | (4,625, 7,952) | (164,543, 253,828) | (3,261, 5,715) | (139,895, 219.391) |
| Participants | 65,255 | 8,102 | 270,224 | 6,310 | 226,103 |
| 18 to 59 years | (55,747, 76,385) | (6,041, 10,866) | (214,304, 340,736) | (4,642, 8,578) | (176,090, 290,321) |
| Participants | 28,137 | 4,238 | 144,440 | 2,700 | 127,601 |
| 60 to 84 years | (21,617, 36,623) | (2,631, 6,826) | (99,617, 209,431) | 1,682, 4,333) | (86,809, 187,561) |

CI = confidence interval;
ELISA = enzyme-linked immunosorbent assay;
EU = ELISA unit;
GMT = geometric mean titer

TABLE 10
Neutralizing Antibody Activity after Primary and Booster Vaccination
for the Ancestral and Beta Variant SARS-CoV-2 Strains by Study Day
for Participants Receiving BV2373 and Saponin Adjuvant

| | MN₅₀ GMT (95% CI) | | | | |
|---|---|---|---|---|---|
| | Day 35 | Day 189 | Day 217 | Day 189 | Day 217 |
| Age Group | Ancestral Strain | Ancestral Strain | Ancestral Strain | Beta variant | Beta variant |
| All Participants, | 1,470 | 63 | 6,023 | 13 | 661 |
| 18 to 84 years | (1,008, 2,145) | (49, 81) | (4,542, 7,988) | (11, 15) | (493, 886) |
| Participants | 2,281 | 80 | 8,568 | 14 | 871 |
| 18 to 59 years | (1,414, 3,678) | (56, 114) | (6,646, 11,046) | (11, 18) | (656, 1,156) |
| Participants | 981 | 47 | 3,936 | 12 | 469 |
| 60 to 84 years | (560, 1,717) | (33, 65) | (2,341, 6,620) | (10, 15) | (270, 816) |

CI = confidence interval;
GMT = geometric mean titer;
MN₅₀ = microneutralization assay at an inhibitory concentration > 50%

TABLE 11A
anti-CoV S IgG over time

| | Anti - rS BV2373 Titer | | | | | | | |
|---|---|---|---|---|---|---|---|---|
| | (EC50) | | | | | | | |
| | (SARS-CoV 2 Virus | | | | | | | |
| | comprising a Spike Protein | | | | Anti - rS BV2465 Titer | | | |
| | with a D614G mutation | | | | (EC50) | | | |
| | compared to SEQ ID NO: 1) | | | | (Delta) | | | |
| | D 0 | D 35 | D 189 | D 217 | D 0 | D 35 | D 189 | D 217 |
| GMT | 166 | 60742 | 5361 | 327758 | 156 | 26097 | 3143 | 290782 |
| Lower 95% CI | 134 | 42176 | 3782 | 225862 | 144 | 17501 | 1952 | 195349 |
| Lower 95% CI | 206 | 87481 | 7599 | 475623 | 169 | 38916 | 5059 | 432836 |
| GMFR | GMFR: 5.4 | | | | GMFR: 11.1 | | | |
| (D 35-D 217) | (CI - 3.34-8.71) | | | | (CI - 6.5-19.1) | | | |
| GMFR | GMFR: 61.2 | | | | GMFR: 92.6 | | | |
| (D 189-D 217) | (CI - 38.9-96.4) | | | | (CI - 52.8-162.4) | | | |
| | Anti - rS BV2438 Titer | | | | Anri - rS BV2425 Titer | | | |
| | (EC50) | | | | (EC50) | | | |
| | (Beta) | | | | (Alpha) | | | |
| | D 0 | D 35 | D 189 | D 217 | D 0 | D 35 | D 189 | D 217 |
| GMT | 161 | 40416 | 4066 | 264321 | 156 | 24333 | 2739 | 235145 |
| Lower 95% CI | 139 | 28091 | 2767 | 177965 | 143 | 15234 | 1777 | 152897 |
| Lower 95% CI | 188 | 58147 | 5975 | 392582 | 171 | 38865 | 4223 | 361636 |

| | | |
|---|---|---|
| GMFR | GMFR: 6.54 | GMFR: 9.7 |
| (D 35-D 217) | (CI - 3.97-10.8) | (CI - 5.56-11.9) |
| GMFR | GMFR: 65.0 | GMFR: 85.9 |
| (D 189-D 217) | (CI - 40.0-105.4) | (CI - 50.4-146.1) |

TABLE 11B
Anti- rS IgG Geometric Mean Titers after Primary and Booster Vaccination
for the Ancestral and Variant SARS-CoV-2 Strains by Study Day
for Participants Receiving BV2373 and Saponin Adjuvant

| | Ancestral | | Delta | | Beta | | Alpha | |
|---|---|---|---|---|---|---|---|---|
| Parameter | Day 35 | Day 217 | Day 35 | Day 217 | Day 35 | Day 217 | Day 35 | Day 217 |
| GMT | 60,742 | 327,758 | 26,097 | 290,782 | 40,416 | 264,321 | 24,333 | 235,145 |
| (95% CI) | (42,176, | (225,862, | (17,501, | (195,349, | (28,091, | (177,965, | (15,234, | (152,897, |
| | 87,481) | 475,623) | 38,916) | 432,836) | 58,147) | 392,582) | 38,865) | 361,636) |

| | | | | |
|---|---|---|---|---|
| GMFR | 5.4 | 11.1 | 6.54 | 9.7 |
| (95% CI) | (3.34, 8.71) | (6.5, 19.1) | (3.97, 10.8) | (5.56, 11.9) |

TABLE 12A
50% hACE2 inhibition titer over time

| | Anti - rS BV2373 RI | | | | | | | | | | | | | | | |
|---|---|---|---|---|---|---|---|---|---|---|---|---|---|---|---|---|
| | Titer (SARS-CoV 2 | | | | | | | | | | | | | | | |
| | Virus comprising a | | | | | | | | | | | | | | | |
| | Spike Protein with a | | | | | | | | | | | | | | | |
| | D614G mutation | | | | Anti - rS BV2465 RI | | | | Anti - rS BV2438 RI | | | | Anti - rS BV2425 RI | | | |
| | compared to SEQ ID | | | | Titer | | | | Titer | | | | Titer | | | |
| | NO: 1) | | | | (Delta) | | | | (Beta) | | | | (Alpha) | | | |
| | D 0 | D 35 | D 189 | D 217 | D 0 | D 35 | D 189 | D 217 | D 0 | D 35 | D 189 | D 217 | D 0 | D 35 | D 189 | D 217 |
| GMT | 10 | 119.6 | 13.3 | 723.1 | 10 | 40.0 | 10.9 | 265.3 | 10 | 24.6 | 10.8 | 265.2 | 10 | 28.7 | 10.7 | 234.4 |
| Lower 95% CI | 10 | 78.7 | 10.03 | 533.5 | 10 | 27.03 | 9.12 | 192.9 | 10 | 16.7 | 9.18 | 189.3 | 10 | 20.0 | 9.30 | 170.2 |
| Lower 95% CI | 10 | 181.9 | 17.6 | 980.0 | 10 | 59.5 | 12.99 | 364.7 | 10 | 36.04 | 12.8 | 371.5 | 10 | 41.05 | 12.3 | 322.8 |

| | | | | |
|---|---|---|---|---|
| GMFR | GMFR: 6.1 | GMFR: 6.61 | GMFR: 10.8 | GMFR: 8.1 |
| (D 35-D 217) | (CI - 3.79-9.89) | (CI - 4.34-10.09) | (CI - 7.1-16.4) | (CI - 5.56-11.9) |
| GMFR | GMFR: 54.4 | GMFR: 24.4 | GMFR: 24.5 | GMFR: 21.9 |
| (D 189-D 217) | (CI - 37.0-79.8) | (CI - 16.6-35.7) | (CI - 16.5-36.4) | (CI - 15.07-31.9) |

TABLE 12B
hACE2 Inhibition Geometric Mean Titers after Primary and Booster
Vaccination for Ancestral and Variant SARS-CoV-2 Strains by Study
Day for Participants Receiving BV2373 and Saponin Adjuvant

| | Ancestral | | Delta | | Beta | | Alpha | |
|---|---|---|---|---|---|---|---|---|
| Parameter | Day 35 | Day 217 | Day 35 | Day 217 | Day 35 | Day 217 | Day 35 | Day 217 |
| GMT | 119.6 | 723.1 | 40.0 | 265.3 | 24.6 | 265.2 | 28.7 | 234.4 |
| (95% CI) | (78.7, | (533.5, | (27.03, | (192.9, | (16.7, | (189.3, | (20.0, | (170.2, |
| | 181.9) | 980.0) | 59.5) | 364.7) | 36.04) | 371.5) | 41.05) | 322.8) |

| | | | | |
|---|---|---|---|---|
| GMFR | 6.1 | 6.61 | 10.8 | 8.1 |
| (95% CI) | (3.79, 9.89) | (4.34, 10.09) | (7.1, 16.4) | (5.56, 11.9) |

TABLE 13
Geometric Mean Titer for Neutralization of SARS-CoV-2 virus
with D614G mutation and the B.1.617-2 Delta Variant

| | SARS-CoV-2 virus with | | Delta | |
|---|---|---|---|---|
| | D614G mutation | | Neut99 Titer | |
| | Neut99 Titer | | (B.617.2) | |
| | D 35 | D 217 | D 35 | D 217 |
| GMT | 853 | 13123 | 331.6 | 4629 |
| Lower 95% CI | 490.2 | 7619 | 212 | 2961 |
| upper 95% CI | 1484 | 22603 | 518.5 | 7236 |

| | | |
|---|---|---|
| GMFR | GMFR: 15.4 | GMFR: 13.9 |
| (D 35-D 217) | (CI - 15.5-15.2) | (CI - 13.95-13.96) |

### INCORPORATION BY REFERENCE

[0519] All references, articles, publications, patents, patent publications, and patent applications cited herein are incorporated by reference in their entireties for all purposes. However, mention of any reference, article, publication, patent, patent publication, and patent application cited herein is not, and should not be taken as, an acknowledgment or any form of suggestion that they constitute valid prior art or form part of the common general knowledge in any country in the world.

The application's sequence listing, which the Patent Office published only in electronic form, follows.

SEQUENCE LISTING (168 sequences)

SEQ ID NO: 1 - protein, 1273 aa, Betacoronavirus severe acute respiratory syndrome coronavirus 2
MFVFLVLLPLVSSQCVNLTTRTQLPPAYTNSFTRGVYYPDKVFRSSVLHSTQDLFLPFFSNVTWFHAIHVSGTNGTKRFDNPVLPFNDGVYFASTEKSNIIRGWIFGTTLDSKTQSLLIVNNATNVVIKVCEFQFCNDPFLGVYYHKNNKSWMESEFRVYSSANNCTFEYVSQPFLMDLEGKQGNFKNLREFVFKNIDGYFKIYSKHTPINLVRDLPQGFSALEPLVDLPIGINITRFQTLLALHRSYLTPGDSSSGWTAGAAAYYVGYLQPRTFLLKYNENGTITDAVDCALDPLSETKCTLKSFTVEKGIYQTSNFRVQPTESIVRFPNITNLCPFGEVFNATRFASVYAWNRKRISNCVADYSVLYNSASFSTFKCYGVSPTKLNDLCFTNVYADSFVIRGDEVRQIAPGQTGKIADYNYKLPDDFTGCVIAWNSNNLDSKVGGNYNYLYRLFRKSNLKPFERDISTEIYQAGSTPCNGVEGFNCYFPLQSYGFQPTNGVGYQPYRVVVLSFELLHAPATVCGPKKSTNLVKNKCVNFNFNGLTGTGVLTESNKKFLPFQQFGRDIADTTDAVRDPQTLEILDITPCSFGGVSVITPGTNTSNQVAVLYQDVNCTEVPVAIHADQLTPTWRVYSTGSNVFQTRAGCLIGAEHVNNSYECDIPIGAGICASYQTQTNSPRRARSVASQSIIAYTMSLGAENSVAYSNNSIAIPTNFTISVTTEILPVSMTKTSVDCTMYICGDSTECSNLLLQYGSFCTQLNRALTGIAVEQDKNTQEVFAQVKQIYKTPPIKDFGGFNFSQILPDPSKPSKRSFIEDLLFNKVTLADAGFIKQYGDCLGDIAARDLICAQKFNGLTVLPPLLTDEMIAQYTSALLAGTITSGWTFGAGAALQIPFAMQMAYRFNGIGVTQNVLYENQKLIANQFNSAIGKIQDSLSSTASALGKLQDVVNQNAQALNTLVKQLSSNFGAISSVLNDILSRLDKVEAEVQIDRLITGRLQSLQTYVTQQLIRAAEIRASANLAATKMSECVLGQSKRVDFCGKGYHLMSFPQSAPHGVVFLHVTYVPAQEKNFTTAPAICHDGKAHFPREGVFVSNGTHWFVTQRNFYEPQIITTDNTFVSGNCDVVIGIVNNTVYDPLQPELDSFKEELDKYFKNHTSPDVDLGDISGINASVVNIQKEIDRLNEVAKNLNESLIDLQELGKYEQYIKWPWYIWLGFIAGLIAIVMVTIMLCCMTSCCSCLKGCCSCGSCCKFDEDDSEPVLKGVKLHYT

SEQ ID NO: 2 - protein, 1260 aa, Betacoronavirus severe acute respiratory syndrome coronavirus 2
QCVNLTTRTQLPPAYTNSFTRGVYYPDKVFRSSVLHSTQDLFLPFFSNVTWFHAIHVSGTNGTKRFDNPVLPFNDGVYFASTEKSNIIRGWIFGTTLDSKTQSLLIVNNATNVVIKVCEFQFCNDPFLGVYYHKNNKSWMESEFRVYSSANNCTFEYVSQPFLMDLEGKQGNFKNLREFVFKNIDGYFKIYSKHTPINLVRDLPQGFSALEPLVDLPIGINITRFQTLLALHRSYLTPGDSSSGWTAGAAAYYVGYLQPRTFLLKYNENGTITDAVDCALDPLSETKCTLKSFTVEKGIYQTSNFRVQPTESIVRFPNITNLCPFGEVFNATRFASVYAWNRKRISNCVADYSVLYNSASFSTFKCYGVSPTKLNDLCFTNVYADSFVIRGDEVRQIAPGQTGKIADYNYKLPDDFTGCVIAWNSNNLDSKVGGNYNYLYRLFRKSNLKPFERDISTEIYQAGSTPCNGVEGFNCYFPLQSYGFQPTNGVGYQPYRVVVLSFELLHAPATVCGPKKSTNLVKNKCVNFNFNGLTGTGVLTESNKKFLPFQQFGRDIADTTDAVRDPQTLEILDITPCSFGGVSVITPGTNTSNQVAVLYQDVNCTEVPVAIHADQLTPTWRVYSTGSNVFQTRAGCLIGAEHVNNSYECDIPIGAGICASYQTQTNSPRRARSVASQSIIAYTMSLGAENSVAYSNNSIAIPTNFTISVTTEILPVSMTKTSVDCTMYICGDSTECSNLLLQYGSFCTQLNRALTGIAVEQDKNTQEVFAQVKQIYKTPPIKDFGGFNFSQILPDPSKPSKRSFIEDLLFNKVTLADAGFIKQYGDCLGDIAARDLICAQKFNGLTVLPPLLTDEMIAQYTSALLAGTITSGWTFGAGAALQIPFAMQMAYRFNGIGVTQNVLYENQKLIANQFNSAIGKIQDSLSSTASALGKLQDVVNQNAQALNTLVKQLSSNFGAISSVLNDILSRLDKVEAEVQIDRLITGRLQSLQTYVTQQLIRAAEIRASANLAATKMSECVLGQSKRVDFCGKGYHLMSFPQSAPHGVVFLHVTYVPAQEKNFTTAPAICHDGKAHFPREGVFVSNGTHWFVTQRNFYEPQIITTDNTFVSGNCDVVIGIVNNTVYDPLQPELDSFKEELDKYFKNHTSPDVDLGDISGINASVVNIQKEIDRLNEVAKNLNESLIDLQELGKYEQYIKWPWYIWLGFIAGLIAIVMVTIMLCCMTSCCSCLKGCCSCGSCCKFDEDDSEPVLKGVKLHYT

SEQ ID NO: 3 - protein, 1273 aa, Artificial Sequence
  RECOMBINANT S PROTEIN
MFVFLVLLPLVSSQCVNLTTRTQLPPAYTNSFTRGVYYPDKVFRSSVLHSTQDLFLPFFSNVTWFHAIHVSGTNGTKRFDNPVLPFNDGVYFASTEKSNIIRGWIFGTTLDSKTQSLLIVNNATNVVIKVCEFQFCNDPFLGVYYHKNNKSWMESEFRVYSSANNCTFEYVSQPFLMDLEGKQGNFKNLREFVFKNIDGYFKIYSKHTPINLVRDLPQGFSALEPLVDLPIGINITRFQTLLALHRSYLTPGDSSSGWTAGAAAYYVGYLQPRTFLLKYNENGTITDAVDCALDPLSETKCTLKSFTVEKGIYQTSNFRVQPTESIVRFPNITNLCPFGEVFNATRFASVYAWNRKRISNCVADYSVLYNSASFSTFKCYGVSPTKLNDLCFTNVYADSFVIRGDEVRQIAPGQTGKIADYNYKLPDDFTGCVIAWNSNNLDSKVGGNYNYLYRLFRKSNLKPFERDISTEIYQAGSTPCNGVEGFNCYFPLQSYGFQPTNGVGYQPYRVVVLSFELLHAPATVCGPKKSTNLVKNKCVNFNFNGLTGTGVLTESNKKFLPFQQFGRDIADTTDAVRDPQTLEILDITPCSFGGVSVITPGTNTSNQVAVLYQDVNCTEVPVAIHADQLTPTWRVYSTGSNVFQTRAGCLIGAEHVNNSYECDIPIGAGICASYQTQTNSPQQAQSVASQSIIAYTMSLGAENSVAYSNNSIAIPTNFTISVTTEILPVSMTKTSVDCTMYICGDSTECSNLLLQYGSFCTQLNRALTGIAVEQDKNTQEVFAQVKQIYKTPPIKDFGGFNFSQILPDPSKPSKRSFIEDLLFNKVTLADAGFIKQYGDCLGDIAARDLICAQKFNGLTVLPPLLTDEMIAQYTSALLAGTITSGWTFGAGAALQIPFAMQMAYRFNGIGVTQNVLYENQKLIANQFNSAIGKIQDSLSSTASALGKLQDVVNQNAQALNTLVKQLSSNFGAISSVLNDILSRLDKVEAEVQIDRLITGRLQSLQTYVTQQLIRAAEIRASANLAATKMSECVLGQSKRVDFCGKGYHLMSFPQSAPHGVVFLHVTYVPAQEKNFTTAPAICHDGKAHFPREGVFVSNGTHWFVTQRNFYEPQIITTDNTFVSGNCDVVIGIVNNTVYDPLQPELDSFKEELDKYFKNHTSPDVDLGDISGINASVVNIQKEIDRLNEVAKNLNESLIDLQELGKYEQYIKWPWYIWLGFIAGLIAIVMVTIMLCCMTSCCSCLKGCCSCGSCCKFDEDDSEPVLKGVKLHYT

SEQ ID NO: 4 - protein, 1260 aa, Artificial Sequence
  RECOMBINANT S PROTEIN
QCVNLTTRTQLPPAYTNSFTRGVYYPDKVFRSSVLHSTQDLFLPFFSNVTWFHAIHVSGTNGTKRFDNPVLPFNDGVYFASTEKSNIIRGWIFGTTLDSKTQSLLIVNNATNVVIKVCEFQFCNDPFLGVYYHKNNKSWMESEFRVYSSANNCTFEYVSQPFLMDLEGKQGNFKNLREFVFKNIDGYFKIYSKHTPINLVRDLPQGFSALEPLVDLPIGINITRFQTLLALHRSYLTPGDSSSGWTAGAAAYYVGYLQPRTFLLKYNENGTITDAVDCALDPLSETKCTLKSFTVEKGIYQTSNFRVQPTESIVRFPNITNLCPFGEVFNATRFASVYAWNRKRISNCVADYSVLYNSASFSTFKCYGVSPTKLNDLCFTNVYADSFVIRGDEVRQIAPGQTGKIADYNYKLPDDFTGCVIAWNSNNLDSKVGGNYNYLYRLFRKSNLKPFERDISTEIYQAGSTPCNGVEGFNCYFPLQSYGFQPTNGVGYQPYRVVVLSFELLHAPATVCGPKKSTNLVKNKCVNFNFNGLTGTGVLTESNKKFLPFQQFGRDIADTTDAVRDPQTLEILDITPCSFGGVSVITPGTNTSNQVAVLYQDVNCTEVPVAIHADQLTPTWRVYSTGSNVFQTRAGCLIGAEHVNNSYECDIPIGAGICASYQTQTNSPQQAQSVASQSIIAYTMSLGAENSVAYSNNSIAIPTNFTISVTTEILPVSMTKTSVDCTMYICGDSTECSNLLLQYGSFCTQLNRALTGIAVEQDKNTQEVFAQVKQIYKTPPIKDFGGFNFSQILPDPSKPSKRSFIEDLLFNKVTLADAGFIKQYGDCLGDIAARDLICAQKFNGLTVLPPLLTDEMIAQYTSALLAGTITSGWTFGAGAALQIPFAMQMAYRFNGIGVTQNVLYENQKLIANQFNSAIGKIQDSLSSTASALGKLQDVVNQNAQALNTLVKQLSSNFGAISSVLNDILSRLDKVEAEVQIDRLITGRLQSLQTYVTQQLIRAAEIRASANLAATKMSECVLGQSKRVDFCGKGYHLMSFPQSAPHGVVFLHVTYVPAQEKNFTTAPAICHDGKAHFPREGVFVSNGTHWFVTQRNFYEPQIITTDNTFVSGNCDVVIGIVNNTVYDPLQPELDSFKEELDKYFKNHTSPDVDLGDISGINASVVNIQKEIDRLNEVAKNLNESLIDLQELGKYEQYIKWPWYIWLGFIAGLIAIVMVTIMLCCMTSCCSCLKGCCSCGSCCKFDEDDSEPVLKGVKLHYT

SEQ ID NO: 5 - protein, 13 aa, Artificial Sequence
  SIGNAL PEPTIDE
MFVFLVLLPLVSS

SEQ ID NO: 6 - protein, 4 aa, Artificial Sequence
  RECOMBINANT FURIN CLEAVAGE SITE
RRAR

SEQ ID NO: 7 - protein, 4 aa, Artificial Sequence
  RECOMBINANT FURIN CLEAVAGE SITE
QQAQ

SEQ ID NO: 8 - protein, 4 aa, Artificial Sequence
  RECOMBINANT FURIN CLEAVAGE SITE
QRAR

SEQ ID NO: 9 - protein, 4 aa, Artificial Sequence
  RECOMBINANT FURIN CLEAVAGE SITE
RQAR

SEQ ID NO: 10 - protein, 4 aa, Artificial Sequence
  RECOMBINANT FURIN CLEAVAGE SITE
RRAQ

SEQ ID NO: 11 - protein, 4 aa, Artificial Sequence
  RECOMBINANT FURIN CLEAVAGE SITE
QQAR

SEQ ID NO: 12 - protein, 4 aa, Artificial Sequence
  RECOMBINANT FURIN CLEAVAGE SITE
RQAQ

SEQ ID NO: 13 - protein, 4 aa, Artificial Sequence
  RECOMBINANT FURIN CLEAVAGE SITE
QRAQ

SEQ ID NO: 14 - protein, 4 aa, Artificial Sequence
  RECOMBINANT FURIN CLEAVAGE SITE
NNAN

SEQ ID NO: 15 - protein, 4 aa, Artificial Sequence
  RECOMBINANT FURIN CLEAVAGE SITE
NRAR

SEQ ID NO: 16 - protein, 4 aa, Artificial Sequence
  RECOMBINANT FURIN CLEAVAGE SITE
RNAR

SEQ ID NO: 17 - protein, 4 aa, Artificial Sequence
  RECOMBINANT FURIN CLEAVAGE SITE
RRAN

SEQ ID NO: 18 - protein, 4 aa, Artificial Sequence
  RECOMBINANT FURIN CLEAVAGE SITE
NNAR

SEQ ID NO: 19 - protein, 4 aa, Artificial Sequence
  RECOMBINANT FURIN CLEAVAGE SITE
RNAN

SEQ ID NO: 20 - protein, 4 aa, Artificial Sequence
  RECOMBINANT FURIN CLEAVAGE SITE
NRAN

SEQ ID NO: 21 - protein, 4 aa, Artificial Sequence
  RECOMBINANT FURIN CLEAVAGE SITE
AAAA

SEQ ID NO: 22 - protein, 4 aa, Artificial Sequence
  RECOMBINANT FURIN CLEAVAGE SITE
ARAR

SEQ ID NO: 23 - protein, 4 aa, Artificial Sequence
  RECOMBINANT FURIN CLEAVAGE SITE
RAAR

SEQ ID NO: 24 - protein, 4 aa, Artificial Sequence
  RECOMBINANT FURIN CLEAVAGE SITE
RRAA

SEQ ID NO: 25 - protein, 4 aa, Artificial Sequence
  RECOMBINANT FURIN CLEAVAGE SITE
AAAR

SEQ ID NO: 26 - protein, 4 aa, Artificial Sequence
  RECOMBINANT FURIN CLEAVAGE SITE
RAAA

SEQ ID NO: 27 - protein, 4 aa, Artificial Sequence
  RECOMBINANT FURIN CLEAVAGE SITE
ARAA

SEQ ID NO: 28 - protein, 4 aa, Artificial Sequence
  RECOMBINANT FURIN CLEAVAGE SITE
GGAG

SEQ ID NO: 29 - protein, 4 aa, Artificial Sequence
  RECOMBINANT FURIN CLEAVAGE SITE
GRAR

SEQ ID NO: 30 - protein, 4 aa, Artificial Sequence
  RECOMBINANT FURIN CLEAVAGE SITE
RGAR

SEQ ID NO: 31 - protein, 4 aa, Artificial Sequence
  RECOMBINANT FURIN CLEAVAGE SITE
RRAG

SEQ ID NO: 32 - protein, 4 aa, Artificial Sequence
  RECOMBINANT FURIN CLEAVAGE SITE
GGAR

SEQ ID NO: 33 - protein, 4 aa, Artificial Sequence
  RECOMBINANT FURIN CLEAVAGE SITE
RGAG

SEQ ID NO: 34 - protein, 4 aa, Artificial Sequence
  RECOMBINANT FURIN CLEAVAGE SITE
GRAG

SEQ ID NO: 35 - DNA, 3819 bp, Artificial Sequence
  RECOMBINANT SPIKE PROTEIN
atgttcgtcttcctggtgctgctgcccctggtgtccagccagtgcgtgaacctgaccactaggactcagctgcctcccgcttacaccaactcattcactcgcggtgtgtactaccctgacaaggtcttccgttcttcagtgctgcactcaactcaggacctgttcctgcccttcttctccaacgtcacctggttccacgccatccacgtgtccggcaccaacggcactaagcgcttcgacaacccagtgctgcctttcaacgacggtgtctacttcgcttcaaccgagaagtccaacatcatccgtggatggatcttcggcaccactctggacagcaagactcagtctctgctgatcgtcaacaacgccaccaacgtggtcatcaaggtctgcgaattccagttctgcaacgacccattcctgggcgtctactaccacaagaacaacaagtcatggatggagtccgaattccgcgtctactccagcgctaacaactgcactttcgagtacgtgtcccagcctttcctgatggacctggaaggaaagcagggtaacttcaagaacctgagggagttcgtgttcaagaacatcgacggatacttcaagatttacagcaagcacaccccaatcaacctggtgcgcgacctgcctcagggtttctctgctctggagccactggtggacctgcctatcggcatcaacatcacccgcttccagactctgctggctctgcaccgttcctacctgactccaggcgactcatcttctggatggactgctggagctgctgcttactacgtgggctacctgcagcctcgcaccttcctgctgaagtacaacgaaaacggaaccatcactgacgccgtcgactgcgctctggaccctctgtcagaaaccaagtgcactctgaagtccttcaccgtggagaagggcatctaccagacttcaaacttcagggtgcagcccaccgaatccatcgtcagattccctaacatcactaacctgtgccccttcggagaggtcttcaacgccacccgcttcgcttccgtgtacgcctggaacaggaagagaatctcaaactgcgtcgctgactactccgtgctgtacaactcagcctccttcagcaccttcaagtgctacggcgtgtcaccaactaagctgaacgacctgtgcttcaccaacgtctacgccgactccttcgtgatcaggggagacgaggtcagacagatcgctcctggccagactggaaagatcgccgactacaactacaagctgcccgacgacttcaccggttgcgtcatcgcttggaacagcaacaacctggactctaaagtgggtggcaactacaactacctgtaccgcctgttccgtaagtcaaacctgaagccattcgagagggacatcagcactgaaatctaccaggccggatctaccccttgcaacggtgtcgagggcttcaactgctacttccccctgcagtcctacggtttccagccaactaacggtgtgggctaccagccttacagagtggtcgtgctgagcttcgaactgctccacgctcctgctactgtgtgcggtccaaagaagtctaccaacctggtcaagaacaagtgcgtgaacttcaacttcaacggcctgaccggaactggtgtcctgaccgagagcaacaagaagttcctgcccttccagcagttcggaagggacatcgctgacaccactgacgctgtgcgcgaccctcagaccctggaaatcctggacatcactccatgctcattcggaggtgtctccgtgatcacccctggcaccaacacttctaaccaggtcgctgtgctgtaccaggacgtcaactgcaccgaggtccctgtggccatccacgctgaccagctgacccccacttggcgcgtgtactccaccggcagcaacgtgttccagactcgtgctggttgcctgatcggcgccgagcacgtgaacaacagctacgaatgcgacatccccatcggcgctggaatctgcgcctcttaccagacccagactaacagcccacgcagggctcgctctgtggcctctcagtcaatcatcgcttacaccatgtcactgggcgctgaaaactccgtggcctactctaacaactcaatcgccatccccaccaacttcactatcagcgtgaccactgagatcctgccagtcagcatgaccaagacttctgtggactgcactatgtacatctgcggagacagcaccgaatgctctaacctgctgctgcagtacggctctttctgcacccagctgaaccgtgctctgactggaatcgccgtggagcaggacaagaacactcaggaagtcttcgctcaggtgaagcaaatctacaagaccccacctatcaaggacttcggcggattcaacttctcccagatcctgcctgacccctccaagccaagcaagcgctctttcatcgaggacctgctgttcaacaaggtcactctggccgacgctggattcatcaagcagtacggagactgcctgggtgacatcgccgctcgtgacctgatctgcgctcagaagttcaacggtctgaccgtgctgcccccactgctgactgacgaaatgatcgcccagtacactagcgccctgctggctggaaccatcacttctggttggaccttcggtgctggcgccgctctgcagatccctttcgctatgcagatggcctaccgtttcaacggaatcggtgtcacccagaacgtgctgtacgagaaccagaagctgatcgctaaccagttcaactcagccatcggaaagatccaggacagcctgagctctactgcctctgctctgggcaagctgcaggacgtcgtgaaccagaacgcccaggctctgaacaccctggtcaagcagctgtcatccaacttcggtgctatcagctctgtgctgaacgacatcctgtcccgcctggacaaggtcgaggccgaagtgcagatcgaccgcctgatcactggccgtctgcagtcactgcagacctacgtgactcagcagctgatcagggccgctgaaatcagagcctccgctaacctggccgctaccaagatgagcgagtgcgtcctgggtcaatctaagcgtgtggacttctgcggcaagggataccacctgatgtcattccctcagtctgctccccacggtgtggtgttcctgcacgtcacctacgtgccagcccaggagaagaacttcaccactgcccctgctatctgccacgacggcaaggctcacttccccagggaaggtgtcttcgtgagcaacggcacccactggttcgtcactcagagaaacttctacgagccacagatcatcaccactgacaacactttcgtgtctggaaactgcgacgtggtcatcggtatcgtcaacaacaccgtgtacgaccccctgcagccagagctggactcattcaaggaggaactggacaagtacttcaagaaccacacctcccctgacgtcgacctgggcgacatctcaggaatcaacgcttccgtcgtgaacatccagaaggagatcgaccgcctgaacgaagtggccaagaacctgaacgaaagcctgatcgacctgcaggagctgggcaagtacgaacagtacatcaagtggccttggtacatctggctgggtttcatcgctggcctcatcgctatcgtgatggtgaccatcatgctgtgctgcatgacttcatgctgctcctgcctgaagggctgctgcagctgcggatcttgctgcaagttcgacgaggacgactctgaacccgtcctgaagggcgtgaagctgcactacacc

SEQ ID NO: 36 - protein, 1279 aa, Artificial Sequence
  RECOMBINANT SPIKE PROTEIN
MFVFLVLLPLVSSQCVNLTTRTQLPPAYTNSFTRGVYYPDKVFRSSVLHSTQDLFLPFFSNVTWFHAIHVSGTNGTKRFDNPVLPFNDGVYFASTEKSNIIRGWIFGTTLDSKTQSLLIVNNATNVVIKVCEFQFCNDPFLGVYYHKNNKSWMESEFRVYSSANNCTFEYVSQPFLMDLEGKQGNFKNLREFVFKNIDGYFKIYSKHTPINLVRDLPQGFSALEPLVDLPIGINITRFQTLLALHRSYLTPGDSSSGWTAGAAAYYVGYLQPRTFLLKYNENGTITDAVDCALDPLSETKCTLKSFTVEKGIYQTSNFRVQPTESIVRFPNITNLCPFGEVFNATRFASVYAWNRKRISNCVADYSVLYNSASFSTFKCYGVSPTKLNDLCFTNVYADSFVIRGDEVRQIAPGQTGKIADYNYKLPDDFTGCVIAWNSNNLDSKVGGNYNYLYRLFRKSNLKPFERDISTEIYQAGSTPCNGVEGFNCYFPLQSYGFQPTNGVGYQPYRVVVLSFELLHAPATVCGPKKSTNLVKNKCVNFNFNGLTGTGVLTESNKKFLPFQQFGRDIADTTDAVRDPQTLEILDITPCSFGGVSVITPGTNTSNQVAVLYQDVNCTEVPVAIHADQLTPTWRVYSTGSNVFQTRAGCLIGAEHVNNSYECDIPIGAGICASYQTQTNSPRRARSVASQSIIAYTMSLGAENSVAYSNNSIAIPTNFTISVTTEILPVSMTKTSVDCTMYICGDSTECSNLLLQYGSFCTQLNRALTGIAVEQDKNTQEVFAQVKQIYKTPPIKDFGGFNFSQILPDPSKPSKRSFIEDLLFNKVTLADAGFIKQYGDCLGDIAARDLICAQKFNGLTVLPPLLTDEMIAQYTSALLAGTITSGWTFGAGAALQIPFAMQMAYRFNGIGVTQNVLYENQKLIANQFNSAIGKIQDSLSSTASALGKLQDVVNQNAQALNTLVKQLSSNFGAISSVLNDILSRLDKVEAEVQIDRLITGRLQSLQTYVTQQLIRAAEIRASANLAATKMSECVLGQSKRVDFCGKGYHLMSFPQSAPHGVVFLHVTYVPAQEKNFTTAPAICHDGKAHFPREGVFVSNGTHWFVTQRNFYEPQIITTDNTFVSGNCDVVIGIVNNTVYDPLQPELDSFKEELDKYFKNHTSPDVDLGDISGINASVVNIQKEIDRLNEVAKNLNESLIDLQELGKYEQYIKWPWYIWLGFIAGLIAIVMVTIMLCCMTSCCSCLKGCCSCGSCCKFDEDDSEPVLKGVKLHYTHHHHHH

SEQ ID NO: 37 - DNA, 3837 bp, Artificial Sequence
  RECOMBINANT SPIKE PROTEIN
atgttcgtcttcctggtgctgctgcccctggtgtccagccagtgcgtgaacctgaccactaggactcagctgcctcccgcttacaccaactcattcactcgcggtgtgtactaccctgacaaggtcttccgttcttcagtgctgcactcaactcaggacctgttcctgcccttcttctccaacgtcacctggttccacgccatccacgtgtccggcaccaacggcactaagcgcttcgacaacccagtgctgcctttcaacgacggtgtctacttcgcttcaaccgagaagtccaacatcatccgtggatggatcttcggcaccactctggacagcaagactcagtctctgctgatcgtcaacaacgccaccaacgtggtcatcaaggtctgcgaattccagttctgcaacgacccattcctgggcgtctactaccacaagaacaacaagtcatggatggagtccgaattccgcgtctactccagcgctaacaactgcactttcgagtacgtgtcccagcctttcctgatggacctggaaggaaagcagggtaacttcaagaacctgagggagttcgtgttcaagaacatcgacggatacttcaagatttacagcaagcacaccccaatcaacctggtgcgcgacctgcctcagggtttctctgctctggagccactggtggacctgcctatcggcatcaacatcacccgcttccagactctgctggctctgcaccgttcctacctgactccaggcgactcatcttctggatggactgctggagctgctgcttactacgtgggctacctgcagcctcgcaccttcctgctgaagtacaacgaaaacggaaccatcactgacgccgtcgactgcgctctggaccctctgtcagaaaccaagtgcactctgaagtccttcaccgtggagaagggcatctaccagacttcaaacttcagggtgcagcccaccgaatccatcgtcagattccctaacatcactaacctgtgccccttcggagaggtcttcaacgccacccgcttcgcttccgtgtacgcctggaacaggaagagaatctcaaactgcgtcgctgactactccgtgctgtacaactcagcctccttcagcaccttcaagtgctacggcgtgtcaccaactaagctgaacgacctgtgcttcaccaacgtctacgccgactccttcgtgatcaggggagacgaggtcagacagatcgctcctggccagactggaaagatcgccgactacaactacaagctgcccgacgacttcaccggttgcgtcatcgcttggaacagcaacaacctggactctaaagtgggtggcaactacaactacctgtaccgcctgttccgtaagtcaaacctgaagccattcgagagggacatcagcactgaaatctaccaggccggatctaccccttgcaacggtgtcgagggcttcaactgctacttccccctgcagtcctacggtttccagccaactaacggtgtgggctaccagccttacagagtggtcgtgctgagcttcgaactgctccacgctcctgctactgtgtgcggtccaaagaagtctaccaacctggtcaagaacaagtgcgtgaacttcaacttcaacggcctgaccggaactggtgtcctgaccgagagcaacaagaagttcctgcccttccagcagttcggaagggacatcgctgacaccactgacgctgtgcgcgaccctcagaccctggaaatcctggacatcactccatgctcattcggaggtgtctccgtgatcacccctggcaccaacacttctaaccaggtcgctgtgctgtaccaggacgtcaactgcaccgaggtccctgtggccatccacgctgaccagctgacccccacttggcgcgtgtactccaccggcagcaacgtgttccagactcgtgctggttgcctgatcggcgccgagcacgtgaacaacagctacgaatgcgacatccccatcggcgctggaatctgcgcctcttaccagacccagactaacagcccacgcagggctcgctctgtggcctctcagtcaatcatcgcttacaccatgtcactgggcgctgaaaactccgtggcctactctaacaactcaatcgccatccccaccaacttcactatcagcgtgaccactgagatcctgccagtcagcatgaccaagacttctgtggactgcactatgtacatctgcggagacagcaccgaatgctctaacctgctgctgcagtacggctctttctgcacccagctgaaccgtgctctgactggaatcgccgtggagcaggacaagaacactcaggaagtcttcgctcaggtgaagcaaatctacaagaccccacctatcaaggacttcggcggattcaacttctcccagatcctgcctgacccctccaagccaagcaagcgctctttcatcgaggacctgctgttcaacaaggtcactctggccgacgctggattcatcaagcagtacggagactgcctgggtgacatcgccgctcgtgacctgatctgcgctcagaagttcaacggtctgaccgtgctgcccccactgctgactgacgaaatgatcgcccagtacactagcgccctgctggctggaaccatcacttctggttggaccttcggtgctggcgccgctctgcagatccctttcgctatgcagatggcctaccgtttcaacggaatcggtgtcacccagaacgtgctgtacgagaaccagaagctgatcgctaaccagttcaactcagccatcggaaagatccaggacagcctgagctctactgcctctgctctgggcaagctgcaggacgtcgtgaaccagaacgcccaggctctgaacaccctggtcaagcagctgtcatccaacttcggtgctatcagctctgtgctgaacgacatcctgtcccgcctggacaaggtcgaggccgaagtgcagatcgaccgcctgatcactggccgtctgcagtcactgcagacctacgtgactcagcagctgatcagggccgctgaaatcagagcctccgctaacctggccgctaccaagatgagcgagtgcgtcctgggtcaatctaagcgtgtggacttctgcggcaagggataccacctgatgtcattccctcagtctgctccccacggtgtggtgttcctgcacgtcacctacgtgccagcccaggagaagaacttcaccactgcccctgctatctgccacgacggcaaggctcacttccccagggaaggtgtcttcgtgagcaacggcacccactggttcgtcactcagagaaacttctacgagccacagatcatcaccactgacaacactttcgtgtctggaaactgcgacgtggtcatcggtatcgtcaacaacaccgtgtacgaccccctgcagccagagctggactcattcaaggaggaactggacaagtacttcaagaaccacacctcccctgacgtcgacctgggcgacatctcaggaatcaacgcttccgtcgtgaacatccagaaggagatcgaccgcctgaacgaagtggccaagaacctgaacgaaagcctgatcgacctgcaggagctgggcaagtacgaacagtacatcaagtggccttggtacatctggctgggtttcatcgctggcctcatcgctatcgtgatggtgaccatcatgctgtgctgcatgacttcatgctgctcctgcctgaagggctgctgcagctgcggatcttgctgcaagttcgacgaggacgactctgaacccgtcctgaagggcgtgaagctgcactacacccaccaccaccaccaccac

SEQ ID NO: 38 - protein, 1266 aa, Artificial Sequence
  RECOMBINANT SPIKE PROTEIN
QCVNLTTRTQLPPAYTNSFTRGVYYPDKVFRSSVLHSTQDLFLPFFSNVTWFHAIHVSGTNGTKRFDNPVLPFNDGVYFASTEKSNIIRGWIFGTTLDSKTQSLLIVNNATNVVIKVCEFQFCNDPFLGVYYHKNNKSWMESEFRVYSSANNCTFEYVSQPFLMDLEGKQGNFKNLREFVFKNIDGYFKIYSKHTPINLVRDLPQGFSALEPLVDLPIGINITRFQTLLALHRSYLTPGDSSSGWTAGAAAYYVGYLQPRTFLLKYNENGTITDAVDCALDPLSETKCTLKSFTVEKGIYQTSNFRVQPTESIVRFPNITNLCPFGEVFNATRFASVYAWNRKRISNCVADYSVLYNSASFSTFKCYGVSPTKLNDLCFTNVYADSFVIRGDEVRQIAPGQTGKIADYNYKLPDDFTGCVIAWNSNNLDSKVGGNYNYLYRLFRKSNLKPFERDISTEIYQAGSTPCNGVEGFNCYFPLQSYGFQPTNGVGYQPYRVVVLSFELLHAPATVCGPKKSTNLVKNKCVNFNFNGLTGTGVLTESNKKFLPFQQFGRDIADTTDAVRDPQTLEILDITPCSFGGVSVITPGTNTSNQVAVLYQDVNCTEVPVAIHADQLTPTWRVYSTGSNVFQTRAGCLIGAEHVNNSYECDIPIGAGICASYQTQTNSPRRARSVASQSIIAYTMSLGAENSVAYSNNSIAIPTNFTISVTTEILPVSMTKTSVDCTMYICGDSTECSNLLLQYGSFCTQLNRALTGIAVEQDKNTQEVFAQVKQIYKTPPIKDFGGFNFSQILPDPSKPSKRSFIEDLLFNKVTLADAGFIKQYGDCLGDIAARDLICAQKFNGLTVLPPLLTDEMIAQYTSALLAGTITSGWTFGAGAALQIPFAMQMAYRFNGIGVTQNVLYENQKLIANQFNSAIGKIQDSLSSTASALGKLQDVVNQNAQALNTLVKQLSSNFGAISSVLNDILSRLDKVEAEVQIDRLITGRLQSLQTYVTQQLIRAAEIRASANLAATKMSECVLGQSKRVDFCGKGYHLMSFPQSAPHGVVFLHVTYVPAQEKNFTTAPAICHDGKAHFPREGVFVSNGTHWFVTQRNFYEPQIITTDNTFVSGNCDVVIGIVNNTVYDPLQPELDSFKEELDKYFKNHTSPDVDLGDISGINASVVNIQKEIDRLNEVAKNLNESLIDLQELGKYEQYIKWPWYIWLGFIAGLIAIVMVTIMLCCMTSCCSCLKGCCSCGSCCKFDEDDSEPVLKGVKLHYTHHHHHH

SEQ ID NO: 39 - protein, 60 aa, Artificial Sequence
  RECOMBINANT SPIKE PROTEIN
WYIWLGFIAGLIAIVMVTIMLCCMTSCCSCLKGCCSCGSCCKFDEDDSEPVLKGVKLHYT

SEQ ID NO: 40 - protein, 1213 aa, Artificial Sequence
  RECOMBINANT SPIKE PROTEIN
MFVFLVLLPLVSSQCVNLTTRTQLPPAYTNSFTRGVYYPDKVFRSSVLHSTQDLFLPFFSNVTWFHAIHVSGTNGTKRFDNPVLPFNDGVYFASTEKSNIIRGWIFGTTLDSKTQSLLIVNNATNVVIKVCEFQFCNDPFLGVYYHKNNKSWMESEFRVYSSANNCTFEYVSQPFLMDLEGKQGNFKNLREFVFKNIDGYFKIYSKHTPINLVRDLPQGFSALEPLVDLPIGINITRFQTLLALHRSYLTPGDSSSGWTAGAAAYYVGYLQPRTFLLKYNENGTITDAVDCALDPLSETKCTLKSFTVEKGIYQTSNFRVQPTESIVRFPNITNLCPFGEVFNATRFASVYAWNRKRISNCVADYSVLYNSASFSTFKCYGVSPTKLNDLCFTNVYADSFVIRGDEVRQIAPGQTGKIADYNYKLPDDFTGCVIAWNSNNLDSKVGGNYNYLYRLFRKSNLKPFERDISTEIYQAGSTPCNGVEGFNCYFPLQSYGFQPTNGVGYQPYRVVVLSFELLHAPATVCGPKKSTNLVKNKCVNFNFNGLTGTGVLTESNKKFLPFQQFGRDIADTTDAVRDPQTLEILDITPCSFGGVSVITPGTNTSNQVAVLYQDVNCTEVPVAIHADQLTPTWRVYSTGSNVFQTRAGCLIGAEHVNNSYECDIPIGAGICASYQTQTNSPRRARSVASQSIIAYTMSLGAENSVAYSNNSIAIPTNFTISVTTEILPVSMTKTSVDCTMYICGDSTECSNLLLQYGSFCTQLNRALTGIAVEQDKNTQEVFAQVKQIYKTPPIKDFGGFNFSQILPDPSKPSKRSFIEDLLFNKVTLADAGFIKQYGDCLGDIAARDLICAQKFNGLTVLPPLLTDEMIAQYTSALLAGTITSGWTFGAGAALQIPFAMQMAYRFNGIGVTQNVLYENQKLIANQFNSAIGKIQDSLSSTASALGKLQDVVNQNAQALNTLVKQLSSNFGAISSVLNDILSRLDKVEAEVQIDRLITGRLQSLQTYVTQQLIRAAEIRASANLAATKMSECVLGQSKRVDFCGKGYHLMSFPQSAPHGVVFLHVTYVPAQEKNFTTAPAICHDGKAHFPREGVFVSNGTHWFVTQRNFYEPQIITTDNTFVSGNCDVVIGIVNNTVYDPLQPELDSFKEELDKYFKNHTSPDVDLGDISGINASVVNIQKEIDRLNEVAKNLNESLIDLQELGKYEQYIKWP

SEQ ID NO: 41 - protein, 1200 aa, Artificial Sequence
  RECOMBINANT SPIKE PROTEIN
QCVNLTTRTQLPPAYTNSFTRGVYYPDKVFRSSVLHSTQDLFLPFFSNVTWFHAIHVSGTNGTKRFDNPVLPFNDGVYFASTEKSNIIRGWIFGTTLDSKTQSLLIVNNATNVVIKVCEFQFCNDPFLGVYYHKNNKSWMESEFRVYSSANNCTFEYVSQPFLMDLEGKQGNFKNLREFVFKNIDGYFKIYSKHTPINLVRDLPQGFSALEPLVDLPIGINITRFQTLLALHRSYLTPGDSSSGWTAGAAAYYVGYLQPRTFLLKYNENGTITDAVDCALDPLSETKCTLKSFTVEKGIYQTSNFRVQPTESIVRFPNITNLCPFGEVFNATRFASVYAWNRKRISNCVADYSVLYNSASFSTFKCYGVSPTKLNDLCFTNVYADSFVIRGDEVRQIAPGQTGKIADYNYKLPDDFTGCVIAWNSNNLDSKVGGNYNYLYRLFRKSNLKPFERDISTEIYQAGSTPCNGVEGFNCYFPLQSYGFQPTNGVGYQPYRVVVLSFELLHAPATVCGPKKSTNLVKNKCVNFNFNGLTGTGVLTESNKKFLPFQQFGRDIADTTDAVRDPQTLEILDITPCSFGGVSVITPGTNTSNQVAVLYQDVNCTEVPVAIHADQLTPTWRVYSTGSNVFQTRAGCLIGAEHVNNSYECDIPIGAGICASYQTQTNSPRRARSVASQSIIAYTMSLGAENSVAYSNNSIAIPTNFTISVTTEILPVSMTKTSVDCTMYICGDSTECSNLLLQYGSFCTQLNRALTGIAVEQDKNTQEVFAQVKQIYKTPPIKDFGGFNFSQILPDPSKPSKRSFIEDLLFNKVTLADAGFIKQYGDCLGDIAARDLICAQKFNGLTVLPPLLTDEMIAQYTSALLAGTITSGWTFGAGAALQIPFAMQMAYRFNGIGVTQNVLYENQKLIANQFNSAIGKIQDSLSSTASALGKLQDVVNQNAQALNTLVKQLSSNFGAISSVLNDILSRLDKVEAEVQIDRLITGRLQSLQTYVTQQLIRAAEIRASANLAATKMSECVLGQSKRVDFCGKGYHLMSFPQSAPHGVVFLHVTYVPAQEKNFTTAPAICHDGKAHFPREGVFVSNGTHWFVTQRNFYEPQIITTDNTFVSGNCDVVIGIVNNTVYDPLQPELDSFKEELDKYFKNHTSPDVDLGDISGINASVVNIQKEIDRLNEVAKNLNESLIDLQELGKYEQYIKWP

SEQ ID NO: 42 - protein, 1219 aa, Artificial Sequence
  RECOMBINANT SPIKE PROTEIN
MFVFLVLLPLVSSQCVNLTTRTQLPPAYTNSFTRGVYYPDKVFRSSVLHSTQDLFLPFFSNVTWFHAIHVSGTNGTKRFDNPVLPFNDGVYFASTEKSNIIRGWIFGTTLDSKTQSLLIVNNATNVVIKVCEFQFCNDPFLGVYYHKNNKSWMESEFRVYSSANNCTFEYVSQPFLMDLEGKQGNFKNLREFVFKNIDGYFKIYSKHTPINLVRDLPQGFSALEPLVDLPIGINITRFQTLLALHRSYLTPGDSSSGWTAGAAAYYVGYLQPRTFLLKYNENGTITDAVDCALDPLSETKCTLKSFTVEKGIYQTSNFRVQPTESIVRFPNITNLCPFGEVFNATRFASVYAWNRKRISNCVADYSVLYNSASFSTFKCYGVSPTKLNDLCFTNVYADSFVIRGDEVRQIAPGQTGKIADYNYKLPDDFTGCVIAWNSNNLDSKVGGNYNYLYRLFRKSNLKPFERDISTEIYQAGSTPCNGVEGFNCYFPLQSYGFQPTNGVGYQPYRVVVLSFELLHAPATVCGPKKSTNLVKNKCVNFNFNGLTGTGVLTESNKKFLPFQQFGRDIADTTDAVRDPQTLEILDITPCSFGGVSVITPGTNTSNQVAVLYQDVNCTEVPVAIHADQLTPTWRVYSTGSNVFQTRAGCLIGAEHVNNSYECDIPIGAGICASYQTQTNSPRRARSVASQSIIAYTMSLGAENSVAYSNNSIAIPTNFTISVTTEILPVSMTKTSVDCTMYICGDSTECSNLLLQYGSFCTQLNRALTGIAVEQDKNTQEVFAQVKQIYKTPPIKDFGGFNFSQILPDPSKPSKRSFIEDLLFNKVTLADAGFIKQYGDCLGDIAARDLICAQKFNGLTVLPPLLTDEMIAQYTSALLAGTITSGWTFGAGAALQIPFAMQMAYRFNGIGVTQNVLYENQKLIANQFNSAIGKIQDSLSSTASALGKLQDVVNQNAQALNTLVKQLSSNFGAISSVLNDILSRLDKVEAEVQIDRLITGRLQSLQTYVTQQLIRAAEIRASANLAATKMSECVLGQSKRVDFCGKGYHLMSFPQSAPHGVVFLHVTYVPAQEKNFTTAPAICHDGKAHFPREGVFVSNGTHWFVTQRNFYEPQIITTDNTFVSGNCDVVIGIVNNTVYDPLQPELDSFKEELDKYFKNHTSPDVDLGDISGINASVVNIQKEIDRLNEVAKNLNESLIDLQELGKYEQYIKWPHHHHHH

SEQ ID NO: 43 - DNA, 3657 bp, Artificial Sequence
  RECOMBINANT SPIKE PROTEIN
atgttcgtcttcctggtgctgctgcccctggtgtccagccagtgcgtgaacctgaccactaggactcagctgcctcccgcttacaccaactcattcactcgcggtgtgtactaccctgacaaggtcttccgttcttcagtgctgcactcaactcaggacctgttcctgcccttcttctccaacgtcacctggttccacgccatccacgtgtccggcaccaacggcactaagcgcttcgacaacccagtgctgcctttcaacgacggtgtctacttcgcttcaaccgagaagtccaacatcatccgtggatggatcttcggcaccactctggacagcaagactcagtctctgctgatcgtcaacaacgccaccaacgtggtcatcaaggtctgcgaattccagttctgcaacgacccattcctgggcgtctactaccacaagaacaacaagtcatggatggagtccgaattccgcgtctactccagcgctaacaactgcactttcgagtacgtgtcccagcctttcctgatggacctggaaggaaagcagggtaacttcaagaacctgagggagttcgtgttcaagaacatcgacggatacttcaagatttacagcaagcacaccccaatcaacctggtgcgcgacctgcctcagggtttctctgctctggagccactggtggacctgcctatcggcatcaacatcacccgcttccagactctgctggctctgcaccgttcctacctgactccaggcgactcatcttctggatggactgctggagctgctgcttactacgtgggctacctgcagcctcgcaccttcctgctgaagtacaacgaaaacggaaccatcactgacgccgtcgactgcgctctggaccctctgtcagaaaccaagtgcactctgaagtccttcaccgtggagaagggcatctaccagacttcaaacttcagggtgcagcccaccgaatccatcgtcagattccctaacatcactaacctgtgccccttcggagaggtcttcaacgccacccgcttcgcttccgtgtacgcctggaacaggaagagaatctcaaactgcgtcgctgactactccgtgctgtacaactcagcctccttcagcaccttcaagtgctacggcgtgtcaccaactaagctgaacgacctgtgcttcaccaacgtctacgccgactccttcgtgatcaggggagacgaggtcagacagatcgctcctggccagactggaaagatcgccgactacaactacaagctgcccgacgacttcaccggttgcgtcatcgcttggaacagcaacaacctggactctaaagtgggtggcaactacaactacctgtaccgcctgttccgtaagtcaaacctgaagccattcgagagggacatcagcactgaaatctaccaggccggatctaccccttgcaacggtgtcgagggcttcaactgctacttccccctgcagtcctacggtttccagccaactaacggtgtgggctaccagccttacagagtggtcgtgctgagcttcgaactgctccacgctcctgctactgtgtgcggtccaaagaagtctaccaacctggtcaagaacaagtgcgtgaacttcaacttcaacggcctgaccggaactggtgtcctgaccgagagcaacaagaagttcctgcccttccagcagttcggaagggacatcgctgacaccactgacgctgtgcgcgaccctcagaccctggaaatcctggacatcactccatgctcattcggaggtgtctccgtgatcacccctggcaccaacacttctaaccaggtcgctgtgctgtaccaggacgtcaactgcaccgaggtccctgtggccatccacgctgaccagctgacccccacttggcgcgtgtactccaccggcagcaacgtgttccagactcgtgctggttgcctgatcggcgccgagcacgtgaacaacagctacgaatgcgacatccccatcggcgctggaatctgcgcctcttaccagacccagactaacagcccacgcagggctcgctctgtggcctctcagtcaatcatcgcttacaccatgtcactgggcgctgaaaactccgtggcctactctaacaactcaatcgccatccccaccaacttcactatcagcgtgaccactgagatcctgccagtcagcatgaccaagacttctgtggactgcactatgtacatctgcggagacagcaccgaatgctctaacctgctgctgcagtacggctctttctgcacccagctgaaccgtgctctgactggaatcgccgtggagcaggacaagaacactcaggaagtcttcgctcaggtgaagcaaatctacaagaccccacctatcaaggacttcggcggattcaacttctcccagatcctgcctgacccctccaagccaagcaagcgctctttcatcgaggacctgctgttcaacaaggtcactctggccgacgctggattcatcaagcagtacggagactgcctgggtgacatcgccgctcgtgacctgatctgcgctcagaagttcaacggtctgaccgtgctgcccccactgctgactgacgaaatgatcgcccagtacactagcgccctgctggctggaaccatcacttctggttggaccttcggtgctggcgccgctctgcagatccctttcgctatgcagatggcctaccgtttcaacggaatcggtgtcacccagaacgtgctgtacgagaaccagaagctgatcgctaaccagttcaactcagccatcggaaagatccaggacagcctgagctctactgcctctgctctgggcaagctgcaggacgtcgtgaaccagaacgcccaggctctgaacaccctggtcaagcagctgtcatccaacttcggtgctatcagctctgtgctgaacgacatcctgtcccgcctggacaaggtcgaggccgaagtgcagatcgaccgcctgatcactggccgtctgcagtcactgcagacctacgtgactcagcagctgatcagggccgctgaaatcagagcctccgctaacctggccgctaccaagatgagcgagtgcgtcctgggtcaatctaagcgtgtggacttctgcggcaagggataccacctgatgtcattccctcagtctgctccccacggtgtggtgttcctgcacgtcacctacgtgccagcccaggagaagaacttcaccactgcccctgctatctgccacgacggcaaggctcacttccccagggaaggtgtcttcgtgagcaacggcacccactggttcgtcactcagagaaacttctacgagccacagatcatcaccactgacaacactttcgtgtctggaaactgcgacgtggtcatcggtatcgtcaacaacaccgtgtacgaccccctgcagccagagctggactcattcaaggaggaactggacaagtacttcaagaaccacacctcccctgacgtcgacctgggcgacatctcaggaatcaacgcttccgtcgtgaacatccagaaggagatcgaccgcctgaacgaagtggccaagaacctgaacgaaagcctgatcgacctgcaggagctgggcaagtacgaacagtacatcaagtggcctcaccaccaccaccaccac

SEQ ID NO: 44 - protein, 1219 aa, Artificial Sequence; identical to SEQ ID NO: 42
  RECOMBINANT SPIKE PROTEIN

SEQ ID NO: 45 - protein, 318 aa, Artificial Sequence
  RECOMBINANT SPIKE PROTEIN
QCVNLTTRTQLPPAYTNSFTRGVYYPDKVFRSSVLHSTQDLFLPFFSNVTWFHAIHVSGTNGTKRFDNPVLPFNDGVYFASTEKSNIIRGWIFGTTLDSKTQSLLIVNNATNVVIKVCEFQFCNDPFLGVYYHKNNKSWMESEFRVYSSANNCTFEYVSQPFLMDLEGKQGNFKNLREFVFKNIDGYFKIYSKHTPINLVRDLPQGFSALEPLVDLPIGINITRFQTLLALHRSYLTPGDSSSGWTAGAAAYYVGYLQPRTFLLKYNENGTITDAVDCALDPLSETKCTLKSFTVEKGIYQTSNFRVQPTESIVRFPN

SEQ ID NO: 46 - protein, 955 aa, Artificial Sequence
  RECOMBINANT SPIKE PROTEIN
MFVFLVLLPLVSSITNLCPFGEVFNATRFASVYAWNRKRISNCVADYSVLYNSASFSTFKCYGVSPTKLNDLCFTNVYADSFVIRGDEVRQIAPGQTGKIADYNYKLPDDFTGCVIAWNSNNLDSKVGGNYNYLYRLFRKSNLKPFERDISTEIYQAGSTPCNGVEGFNCYFPLQSYGFQPTNGVGYQPYRVVVLSFELLHAPATVCGPKKSTNLVKNKCVNFNFNGLTGTGVLTESNKKFLPFQQFGRDIADTTDAVRDPQTLEILDITPCSFGGVSVITPGTNTSNQVAVLYQDVNCTEVPVAIHADQLTPTWRVYSTGSNVFQTRAGCLIGAEHVNNSYECDIPIGAGICASYQTQTNSPRRARSVASQSIIAYTMSLGAENSVAYSNNSIAIPTNFTISVTTEILPVSMTKTSVDCTMYICGDSTECSNLLLQYGSFCTQLNRALTGIAVEQDKNTQEVFAQVKQIYKTPPIKDFGGFNFSQILPDPSKPSKRSFIEDLLFNKVTLADAGFIKQYGDCLGDIAARDLICAQKFNGLTVLPPLLTDEMIAQYTSALLAGTITSGWTFGAGAALQIPFAMQMAYRFNGIGVTQNVLYENQKLIANQFNSAIGKIQDSLSSTASALGKLQDVVNQNAQALNTLVKQLSSNFGAISSVLNDILSRLDKVEAEVQIDRLITGRLQSLQTYVTQQLIRAAEIRASANLAATKMSECVLGQSKRVDFCGKGYHLMSFPQSAPHGVVFLHVTYVPAQEKNFTTAPAICHDGKAHFPREGVFVSNGTHWFVTQRNFYEPQIITTDNTFVSGNCDVVIGIVNNTVYDPLQPELDSFKEELDKYFKNHTSPDVDLGDISGINASVVNIQKEIDRLNEVAKNLNESLIDLQELGKYEQYIKWPWYIWLGFIAGLIAIVMVTIMLCCMTSCCSCLKGCCSCGSCCKFDEDDSEPVLKGVKLHYT

SEQ ID NO: 47 - DNA, 2868 bp, Artificial Sequence
  RECOMBINANT SPIKE PROTEIN
atgttcgtcttcctggtgctgctgcccctggtgtccagcatcactaacctgtgccccttcggagaggtcttcaacgccacccgcttcgcttccgtgtacgcctggaacaggaagagaatctcaaactgcgtcgctgactactccgtgctgtacaactcagcctccttcagcaccttcaagtgctacggcgtgtcaccaactaagctgaacgacctgtgcttcaccaacgtctacgccgactccttcgtgatcaggggagacgaggtcagacagatcgctcctggccagactggaaagatcgccgactacaactacaagctgcccgacgacttcaccggttgcgtcatcgcttggaacagcaacaacctggactctaaagtgggtggcaactacaactacctgtaccgcctgttccgtaagtcaaacctgaagccattcgagagggacatcagcactgaaatctaccaggccggatctaccccttgcaacggtgtcgagggcttcaactgctacttccccctgcagtcctacggtttccagccaactaacggtgtgggctaccagccttacagagtggtcgtgctgagcttcgaactgctccacgctcctgctactgtgtgcggtccaaagaagtctaccaacctggtcaagaacaagtgcgtgaacttcaacttcaacggcctgaccggaactggtgtcctgaccgagagcaacaagaagttcctgcccttccagcagttcggaagggacatcgctgacaccactgacgctgtgcgcgaccctcagaccctggaaatcctggacatcactccatgctcattcggaggtgtctccgtgatcacccctggcaccaacacttctaaccaggtcgctgtgctgtaccaggacgtcaactgcaccgaggtccctgtggccatccacgctgaccagctgacccccacttggcgcgtgtactccaccggcagcaacgtgttccagactcgtgctggttgcctgatcggcgccgagcacgtgaacaacagctacgaatgcgacatccccatcggcgctggaatctgcgcctcttaccagacccagactaacagcccacgcagggctcgctctgtggcctctcagtcaatcatcgcttacaccatgtcactgggcgctgaaaactccgtggcctactctaacaactcaatcgccatccccaccaacttcactatcagcgtgaccactgagatcctgccagtcagcatgaccaagacttctgtggactgcactatgtacatctgcggagacagcaccgaatgctctaacctgctgctgcagtacggctctttctgcacccagctgaaccgtgctctgactggaatcgccgtggagcaggacaagaacactcaggaagtcttcgctcaggtgaagcaaatctacaagaccccacctatcaaggacttcggcggattcaacttctcccagatcctgcctgacccctccaagccaagcaagcgctctttcatcgaggacctgctgttcaacaaggtcactctggccgacgctggattcatcaagcagtacggagactgcctgggtgacatcgccgctcgtgacctgatctgcgctcagaagttcaacggtctgaccgtgctgcccccactgctgactgacgaaatgatcgcccagtacactagcgccctgctggctggaaccatcacttctggttggaccttcggtgctggcgccgctctgcagatccctttcgctatgcagatggcctaccgtttcaacggaatcggtgtcacccagaacgtgctgtacgagaaccagaagctgatcgctaaccagttcaactcagccatcggaaagatccaggacagcctgagctctactgcctctgctctgggcaagctgcaggacgtcgtgaaccagaacgcccaggctctgaacaccctggtcaagcagctgtcatccaacttcggtgctatcagctctgtgctgaacgacatcctgtcccgcctggacaaggtcgaggccgaagtgcagatcgaccgcctgatcactggccgtctgcagtcactgcagacctacgtgactcagcagctgatcagggccgctgaaatcagagcctccgctaacctggccgctaccaagatgagcgagtgcgtcctgggtcaatctaagcgtgtggacttctgcggcaagggataccacctgatgtcattccctcagtctgctccccacggtgtggtgttcctgcacgtcacctacgtgccagcccaggagaagaacttcaccactgcccctgctatctgccacgacggcaaggctcacttccccagggaaggtgtcttcgtgagcaacggcacccactggttcgtcactcagagaaacttctacgagccacagatcatcaccactgacaacactttcgtgtctggaaactgcgacgtggtcatcggtatcgtcaacaacaccgtgtacgaccccctgcagccagagctggactcattcaaggaggaactggacaagtacttcaagaaccacacctcccctgacgtcgacctgggcgacatctcaggaatcaacgcttccgtcgtgaacatccagaaggagatcgaccgcctgaacgaagtggccaagaacctgaacgaaagcctgatcgacctgcaggagctgggcaagtacgaacagtacatcaagtggccttggtacatctggctgggtttcatcgctggcctcatcgctatcgtgatggtgaccatcatgctgtgctgcatgacttcatgctgctcctgcctgaagggctgctgcagctgcggatcttgctgcaagttcgacgaggacgactctgaacccgtcctgaagggcgtgaagctgcactacacctaa

SEQ ID NO: 48 - protein, 942 aa, Artificial Sequence
  RECOMBINANT SPIKE PROTEIN
ITNLCPFGEVFNATRFASVYAWNRKRISNCVADYSVLYNSASFSTFKCYGVSPTKLNDLCFTNVYADSFVIRGDEVRQIAPGQTGKIADYNYKLPDDFTGCVIAWNSNNLDSKVGGNYNYLYRLFRKSNLKPFERDISTEIYQAGSTPCNGVEGFNCYFPLQSYGFQPTNGVGYQPYRVVVLSFELLHAPATVCGPKKSTNLVKNKCVNFNFNGLTGTGVLTESNKKFLPFQQFGRDIADTTDAVRDPQTLEILDITPCSFGGVSVITPGTNTSNQVAVLYQDVNCTEVPVAIHADQLTPTWRVYSTGSNVFQTRAGCLIGAEHVNNSYECDIPIGAGICASYQTQTNSPRRARSVASQSIIAYTMSLGAENSVAYSNNSIAIPTNFTISVTTEILPVSMTKTSVDCTMYICGDSTECSNLLLQYGSFCTQLNRALTGIAVEQDKNTQEVFAQVKQIYKTPPIKDFGGFNFSQILPDPSKPSKRSFIEDLLFNKVTLADAGFIKQYGDCLGDIAARDLICAQKFNGLTVLPPLLTDEMIAQYTSALLAGTITSGWTFGAGAALQIPFAMQMAYRFNGIGVTQNVLYENQKLIANQFNSAIGKIQDSLSSTASALGKLQDVVNQNAQALNTLVKQLSSNFGAISSVLNDILSRLDKVEAEVQIDRLITGRLQSLQTYVTQQLIRAAEIRASANLAATKMSECVLGQSKRVDFCGKGYHLMSFPQSAPHGVVFLHVTYVPAQEKNFTTAPAICHDGKAHFPREGVFVSNGTHWFVTQRNFYEPQIITTDNTFVSGNCDVVIGIVNNTVYDPLQPELDSFKEELDKYFKNHTSPDVDLGDISGINASVVNIQKEIDRLNEVAKNLNESLIDLQELGKYEQYIKWPWYIWLGFIAGLIAIVMVTIMLCCMTSCCSCLKGCCSCGSCCKFDEDDSEPVLKGVKLHYT

SEQ ID NO: 49 - protein, 960 aa, Artificial Sequence
  RECOMBINANT SPIKE PROTEIN
MFVFLVLLPLVSSITNLCPFGEVFNATRFASVYAWNRKRISNCVADYSVLYNSASFSTFKCYGVSPTKLNDLCFTNVYADSFVIRGDEVRQIAPGQTGKIADYNYKLPDDFTGCVIAWNSNNLDSKVGGNYNYLYRLFRKSNLKPFERDISTEIYQAGSTPCNGVEGFNCYFPLQSYGFQPTNGVGYQPYRVVVLSFELLHAPATVCGPKKSTNLVKNKCVNFNFNGLTGTGVLTESNKKFLPFQQFGRDIADTTDAVRDPQTLEILDITPCSFGGVSVITPGTNTSNQVAVLYQDVNCTEVPVAIHADQLTPTWRVYSTGSNVFQTRAGCLIGAEHVNNSYECDIPIGAGICASYQTQTNSPRRARSVASQSIIAYTMSLGAENSVAYSNNSIAIPTNFTISVTTEILPVSMTKTSVDCTMYICGDSTECSNLLLQYGSFCTQLNRALTGIAVEQDKNTQEVFAQVKQIYKTPPIKDFGGFNFSQILPDPSKPSKRSFIEDLLFNKVTLADAGFIKQYGDCLGDIAARDLICAQKFNGLTVLPPLLTDEMIAQYTSALLAGTITSGWTFGAGAALQIPFAMQMAYRFNGIGVTQNVLYENQKLIANQFNSAIGKIQDSLSSTASALGKLQDVVNQNAQALNTLVKQLSSNFGAISSVLNDILSRLDKVEAEVQIDRLITGRLQSLQTYVTQQLIRAAEIRASANLAATKMSECVLGQSKRVDFCGKGYHLMSFPQSAPHGVVFLHVTYVPAQEKNFTTAPAICHDGKAHFPREGVFVSNGTHWFVTQRNFYEPQIITTDNTFVSGNCDVVIGIVNNTVYDPLQPELDSFKEELDKYFKNHTSPDVDLGDISGINASVVNIQKEIDRLNEVAKNLNESLIDLQELGKYEQYIKWPWYIWLGFIAGLIAIVMVTIMLCCMTSCCSCLKGCCSCGSCCKFDEDDSEPVLKGVKLHYTHHHHH

SEQ ID NO: 50 - DNA, 2883 bp, Artificial Sequence
  RECOMBINANT SPIKE PROTEIN
atgttcgtcttcctggtgctgctgcccctggtgtccagcatcactaacctgtgccccttcggagaggtcttcaacgccacccgcttcgcttccgtgtacgcctggaacaggaagagaatctcaaactgcgtcgctgactactccgtgctgtacaactcagcctccttcagcaccttcaagtgctacggcgtgtcaccaactaagctgaacgacctgtgcttcaccaacgtctacgccgactccttcgtgatcaggggagacgaggtcagacagatcgctcctggccagactggaaagatcgccgactacaactacaagctgcccgacgacttcaccggttgcgtcatcgcttggaacagcaacaacctggactctaaagtgggtggcaactacaactacctgtaccgcctgttccgtaagtcaaacctgaagccattcgagagggacatcagcactgaaatctaccaggccggatctaccccttgcaacggtgtcgagggcttcaactgctacttccccctgcagtcctacggtttccagccaactaacggtgtgggctaccagccttacagagtggtcgtgctgagcttcgaactgctccacgctcctgctactgtgtgcggtccaaagaagtctaccaacctggtcaagaacaagtgcgtgaacttcaacttcaacggcctgaccggaactggtgtcctgaccgagagcaacaagaagttcctgcccttccagcagttcggaagggacatcgctgacaccactgacgctgtgcgcgaccctcagaccctggaaatcctggacatcactccatgctcattcggaggtgtctccgtgatcacccctggcaccaacacttctaaccaggtcgctgtgctgtaccaggacgtcaactgcaccgaggtccctgtggccatccacgctgaccagctgacccccacttggcgcgtgtactccaccggcagcaacgtgttccagactcgtgctggttgcctgatcggcgccgagcacgtgaacaacagctacgaatgcgacatccccatcggcgctggaatctgcgcctcttaccagacccagactaacagcccacgcagggctcgctctgtggcctctcagtcaatcatcgcttacaccatgtcactgggcgctgaaaactccgtggcctactctaacaactcaatcgccatccccaccaacttcactatcagcgtgaccactgagatcctgccagtcagcatgaccaagacttctgtggactgcactatgtacatctgcggagacagcaccgaatgctctaacctgctgctgcagtacggctctttctgcacccagctgaaccgtgctctgactggaatcgccgtggagcaggacaagaacactcaggaagtcttcgctcaggtgaagcaaatctacaagaccccacctatcaaggacttcggcggattcaacttctcccagatcctgcctgacccctccaagccaagcaagcgctctttcatcgaggacctgctgttcaacaaggtcactctggccgacgctggattcatcaagcagtacggagactgcctgggtgacatcgccgctcgtgacctgatctgcgctcagaagttcaacggtctgaccgtgctgcccccactgctgactgacgaaatgatcgcccagtacactagcgccctgctggctggaaccatcacttctggttggaccttcggtgctggcgccgctctgcagatccctttcgctatgcagatggcctaccgtttcaacggaatcggtgtcacccagaacgtgctgtacgagaaccagaagctgatcgctaaccagttcaactcagccatcggaaagatccaggacagcctgagctctactgcctctgctctgggcaagctgcaggacgtcgtgaaccagaacgcccaggctctgaacaccctggtcaagcagctgtcatccaacttcggtgctatcagctctgtgctgaacgacatcctgtcccgcctggacaaggtcgaggccgaagtgcagatcgaccgcctgatcactggccgtctgcagtcactgcagacctacgtgactcagcagctgatcagggccgctgaaatcagagcctccgctaacctggccgctaccaagatgagcgagtgcgtcctgggtcaatctaagcgtgtggacttctgcggcaagggataccacctgatgtcattccctcagtctgctccccacggtgtggtgttcctgcacgtcacctacgtgccagcccaggagaagaacttcaccactgcccctgctatctgccacgacggcaaggctcacttccccagggaaggtgtcttcgtgagcaacggcacccactggttcgtcactcagagaaacttctacgagccacagatcatcaccactgacaacactttcgtgtctggaaactgcgacgtggtcatcggtatcgtcaacaacaccgtgtacgaccccctgcagccagagctggactcattcaaggaggaactggacaagtacttcaagaaccacacctcccctgacgtcgacctgggcgacatctcaggaatcaacgcttccgtcgtgaacatccagaaggagatcgaccgcctgaacgaagtggccaagaacctgaacgaaagcctgatcgacctgcaggagctgggcaagtacgaacagtacatcaagtggccttggtacatctggctgggtttcatcgctggcctcatcgctatcgtgatggtgaccatcatgctgtgctgcatgacttcatgctgctcctgcctgaagggctgctgcagctgcggatcttgctgcaagttcgacgaggacgactctgaacccgtcctgaagggcgtgaagctgcactacacccaccaccaccaccaccac

SEQ ID NO: 51 - protein, 947 aa, Artificial Sequence
  RECOMBINANT SPIKE PROTEIN
ITNLCPFGEVFNATRFASVYAWNRKRISNCVADYSVLYNSASFSTFKCYGVSPTKLNDLCFTNVYADSFVIRGDEVRQIAPGQTGKIADYNYKLPDDFTGCVIAWNSNNLDSKVGGNYNYLYRLFRKSNLKPFERDISTEIYQAGSTPCNGVEGFNCYFPLQSYGFQPTNGVGYQPYRVVVLSFELLHAPATVCGPKKSTNLVKNKCVNFNFNGLTGTGVLTESNKKFLPFQQFGRDIADTTDAVRDPQTLEILDITPCSFGGVSVITPGTNTSNQVAVLYQDVNCTEVPVAIHADQLTPTWRVYSTGSNVFQTRAGCLIGAEHVNNSYECDIPIGAGICASYQTQTNSPRRARSVASQSIIAYTMSLGAENSVAYSNNSIAIPTNFTISVTTEILPVSMTKTSVDCTMYICGDSTECSNLLLQYGSFCTQLNRALTGIAVEQDKNTQEVFAQVKQIYKTPPIKDFGGFNFSQILPDPSKPSKRSFIEDLLFNKVTLADAGFIKQYGDCLGDIAARDLICAQKFNGLTVLPPLLTDEMIAQYTSALLAGTITSGWTFGAGAALQIPFAMQMAYRFNGIGVTQNVLYENQKLIANQFNSAIGKIQDSLSSTASALGKLQDVVNQNAQALNTLVKQLSSNFGAISSVLNDILSRLDKVEAEVQIDRLITGRLQSLQTYVTQQLIRAAEIRASANLAATKMSECVLGQSKRVDFCGKGYHLMSFPQSAPHGVVFLHVTYVPAQEKNFTTAPAICHDGKAHFPREGVFVSNGTHWFVTQRNFYEPQIITTDNTFVSGNCDVVIGIVNNTVYDPLQPELDSFKEELDKYFKNHTSPDVDLGDISGINASVVNIQKEIDRLNEVAKNLNESLIDLQELGKYEQYIKWPWYIWLGFIAGLIAIVMVTIMLCCMTSCCSCLKGCCSCGSCCKFDEDDSEPVLKGVKLHYTHHHHH

SEQ ID NO: 52 - protein, 901 aa, Artificial Sequence
  RECOMBINANT SPIKE PROTEIN
MFVFLVLLPLVSSITNLCPFGEVFNATRFASVYAWNRKRISNCVADYSVLYNSASFSTFKCYGVSPTKLNDLCFTNVYADSFVIRGDEVRQIAPGQTGKIADYNYKLPDDFTGCVIAWNSNNLDSKVGGNYNYLYRLFRKSNLKPFERDISTEIYQAGSTPCNGVEGFNCYFPLQSYGFQPTNGVGYQPYRVVVLSFELLHAPATVCGPKKSTNLVKNKCVNFNFNGLTGTGVLTESNKKFLPFQQFGRDIADTTDAVRDPQTLEILDITPCSFGGVSVITPGTNTSNQVAVLYQDVNCTEVPVAIHADQLTPTWRVYSTGSNVFQTRAGCLIGAEHVNNSYECDIPIGAGICASYQTQTNSPRRARSVASQSIIAYTMSLGAENSVAYSNNSIAIPTNFTISVTTEILPVSMTKTSVDCTMYICGDSTECSNLLLQYGSFCTQLNRALTGIAVEQDKNTQEVFAQVKQIYKTPPIKDFGGFNFSQILPDPSKPSKRSFIEDLLFNKVTLADAGFIKQYGDCLGDIAARDLICAQKFNGLTVLPPLLTDEMIAQYTSALLAGTITSGWTFGAGAALQIPFAMQMAYRFNGIGVTQNVLYENQKLIANQFNSAIGKIQDSLSSTASALGKLQDVVNQNAQALNTLVKQLSSNFGAISSVLNDILSRLDKVEAEVQIDRLITGRLQSLQTYVTQQLIRAAEIRASANLAATKMSECVLGQSKRVDFCGKGYHLMSFPQSAPHGVVFLHVTYVPAQEKNFTTAPAICHDGKAHFPREGVFVSNGTHWFVTQRNFYEPQIITTDNTFVSGNCDVVIGIVNNTVYDPLQPELDSFKEELDKYFKNHTSPDVDLGDISGINASVVNIQKEIDRLNEVAKNLNESLIDLQELGKYEQYIKWPHHHHHH

SEQ ID NO: 53 - DNA, 2706 bp, Artificial Sequence
  RECOMBINANT SPIKE PROTEIN
atgttcgtcttcctggtgctgctgcccctggtgtccagcatcactaacctgtgccccttcggagaggtcttcaacgccacccgcttcgcttccgtgtacgcctggaacaggaagagaatctcaaactgcgtcgctgactactccgtgctgtacaactcagcctccttcagcaccttcaagtgctacggcgtgtcaccaactaagctgaacgacctgtgcttcaccaacgtctacgccgactccttcgtgatcaggggagacgaggtcagacagatcgctcctggccagactggaaagatcgccgactacaactacaagctgcccgacgacttcaccggttgcgtcatcgcttggaacagcaacaacctggactctaaagtgggtggcaactacaactacctgtaccgcctgttccgtaagtcaaacctgaagccattcgagagggacatcagcactgaaatctaccaggccggatctaccccttgcaacggtgtcgagggcttcaactgctacttccccctgcagtcctacggtttccagccaactaacggtgtgggctaccagccttacagagtggtcgtgctgagcttcgaactgctccacgctcctgctactgtgtgcggtccaaagaagtctaccaacctggtcaagaacaagtgcgtgaacttcaacttcaacggcctgaccggaactggtgtcctgaccgagagcaacaagaagttcctgcccttccagcagttcggaagggacatcgctgacaccactgacgctgtgcgcgaccctcagaccctggaaatcctggacatcactccatgctcattcggaggtgtctccgtgatcacccctggcaccaacacttctaaccaggtcgctgtgctgtaccaggacgtcaactgcaccgaggtccctgtggccatccacgctgaccagctgacccccacttggcgcgtgtactccaccggcagcaacgtgttccagactcgtgctggttgcctgatcggcgccgagcacgtgaacaacagctacgaatgcgacatccccatcggcgctggaatctgcgcctcttaccagacccagactaacagcccacgcagggctcgctctgtggcctctcagtcaatcatcgcttacaccatgtcactgggcgctgaaaactccgtggcctactctaacaactcaatcgccatccccaccaacttcactatcagcgtgaccactgagatcctgccagtcagcatgaccaagacttctgtggactgcactatgtacatctgcggagacagcaccgaatgctctaacctgctgctgcagtacggctctttctgcacccagctgaaccgtgctctgactggaatcgccgtggagcaggacaagaacactcaggaagtcttcgctcaggtgaagcaaatctacaagaccccacctatcaaggacttcggcggattcaacttctcccagatcctgcctgacccctccaagccaagcaagcgctctttcatcgaggacctgctgttcaacaaggtcactctggccgacgctggattcatcaagcagtacggagactgcctgggtgacatcgccgctcgtgacctgatctgcgctcagaagttcaacggtctgaccgtgctgcccccactgctgactgacgaaatgatcgcccagtacactagcgccctgctggctggaaccatcacttctggttggaccttcggtgctggcgccgctctgcagatccctttcgctatgcagatggcctaccgtttcaacggaatcggtgtcacccagaacgtgctgtacgagaaccagaagctgatcgctaaccagttcaactcagccatcggaaagatccaggacagcctgagctctactgcctctgctctgggcaagctgcaggacgtcgtgaaccagaacgcccaggctctgaacaccctggtcaagcagctgtcatccaacttcggtgctatcagctctgtgctgaacgacatcctgtcccgcctggacaaggtcgaggccgaagtgcagatcgaccgcctgatcactggccgtctgcagtcactgcagacctacgtgactcagcagctgatcagggccgctgaaatcagagcctccgctaacctggccgctaccaagatgagcgagtgcgtcctgggtcaatctaagcgtgtggacttctgcggcaagggataccacctgatgtcattccctcagtctgctccccacggtgtggtgttcctgcacgtcacctacgtgccagcccaggagaagaacttcaccactgcccctgctatctgccacgacggcaaggctcacttccccagggaaggtgtcttcgtgagcaacggcacccactggttcgtcactcagagaaacttctacgagccacagatcatcaccactgacaacactttcgtgtctggaaactgcgacgtggtcatcggtatcgtcaacaacaccgtgtacgaccccctgcagccagagctggactcattcaaggaggaactggacaagtacttcaagaaccacacctcccctgacgtcgacctgggcgacatctcaggaatcaacgcttccgtcgtgaacatccagaaggagatcgaccgcctgaacgaagtggccaagaacctgaacgaaagcctgatcgacctgcaggagctgggcaagtacgaacagtacatcaagtggcctcaccaccaccaccaccaccac

SEQ ID NO: 54 - protein, 888 aa, Artificial Sequence
  RECOMBINANT SPIKE PROTEIN
ITNLCPFGEVFNATRFASVYAWNRKRISNCVADYSVLYNSASFSTFKCYGVSPTKLNDLCFTNVYADSFVIRGDEVRQIAPGQTGKIADYNYKLPDDFTGCVIAWNSNNLDSKVGGNYNYLYRLFRKSNLKPFERDISTEIYQAGSTPCNGVEGFNCYFPLQSYGFQPTNGVGYQPYRVVVLSFELLHAPATVCGPKKSTNLVKNKCVNFNFNGLTGTGVLTESNKKFLPFQQFGRDIADTTDAVRDPQTLEILDITPCSFGGVSVITPGTNTSNQVAVLYQDVNCTEVPVAIHADQLTPTWRVYSTGSNVFQTRAGCLIGAEHVNNSYECDIPIGAGICASYQTQTNSPRRARSVASQSIIAYTMSLGAENSVAYSNNSIAIPTNFTISVTTEILPVSMTKTSVDCTMYICGDSTECSNLLLQYGSFCTQLNRALTGIAVEQDKNTQEVFAQVKQIYKTPPIKDFGGFNFSQILPDPSKPSKRSFIEDLLFNKVTLADAGFIKQYGDCLGDIAARDLICAQKFNGLTVLPPLLTDEMIAQYTSALLAGTITSGWTFGAGAALQIPFAMQMAYRFNGIGVTQNVLYENQKLIANQFNSAIGKIQDSLSSTASALGKLQDVVNQNAQALNTLVKQLSSNFGAISSVLNDILSRLDKVEAEVQIDRLITGRLQSLQTYVTQQLIRAAEIRASANLAATKMSECVLGQSKRVDFCGKGYHLMSFPQSAPHGVVFLHVTYVPAQEKNFTTAPAICHDGKAHFPREGVFVSNGTHWFVTQRNFYEPQIITTDNTFVSGNCDVVIGIVNNTVYDPLQPELDSFKEELDKYFKNHTSPDVDLGDISGINASVVNIQKEIDRLNEVAKNLNESLIDLQELGKYEQYIKWPHHHHHH

SEQ ID NO: 55 - DNA, 3819 bp, Artificial Sequence
  RECOMBINANT SPIKE PROTEIN
atgttcgtcttcctggtgctgctgcccctggtgtccagccagtgcgtgaacctgaccactaggactcagctgcctcccgcttacaccaactcattcactcgcggtgtgtactaccctgacaaggtcttccgttcttcagtgctgcactcaactcaggacctgttcctgcccttcttctccaacgtcacctggttccacgccatccacgtgtccggcaccaacggcactaagcgcttcgacaacccagtgctgcctttcaacgacggtgtctacttcgcttcaaccgagaagtccaacatcatccgtggatggatcttcggcaccactctggacagcaagactcagtctctgctgatcgtcaacaacgccaccaacgtggtcatcaaggtctgcgaattccagttctgcaacgacccattcctgggcgtctactaccacaagaacaacaagtcatggatggagtccgaattccgcgtctactccagcgctaacaactgcactttcgagtacgtgtcccagcctttcctgatggacctggaaggaaagcagggtaacttcaagaacctgagggagttcgtgttcaagaacatcgacggatacttcaagatttacagcaagcacaccccaatcaacctggtgcgcgacctgcctcagggtttctctgctctggagccactggtggacctgcctatcggcatcaacatcacccgcttccagactctgctggctctgcaccgttcctacctgactccaggcgactcatcttctggatggactgctggagctgctgcttactacgtgggctacctgcagcctcgcaccttcctgctgaagtacaacgaaaacggaaccatcactgacgccgtcgactgcgctctggaccctctgtcagaaaccaagtgcactctgaagtccttcaccgtggagaagggcatctaccagacttcaaacttcagggtgcagcccaccgaatccatcgtcagattccctaacatcactaacctgtgccccttcggagaggtcttcaacgccacccgcttcgcttccgtgtacgcctggaacaggaagagaatctcaaactgcgtcgctgactactccgtgctgtacaactcagcctccttcagcaccttcaagtgctacggcgtgtcaccaactaagctgaacgacctgtgcttcaccaacgtctacgccgactccttcgtgatcaggggagacgaggtcagacagatcgctcctggccagactggaaagatcgccgactacaactacaagctgcccgacgacttcaccggttgcgtcatcgcttggaacagcaacaacctggactctaaagtgggtggcaactacaactacctgtaccgcctgttccgtaagtcaaacctgaagccattcgagagggacatcagcactgaaatctaccaggccggatctaccccttgcaacggtgtcgagggcttcaactgctacttccccctgcagtcctacggtttccagccaactaacggtgtgggctaccagccttacagagtggtcgtgctgagcttcgaactgctccacgctcctgctactgtgtgcggtccaaagaagtctaccaacctggtcaagaacaagtgcgtgaacttcaacttcaacggcctgaccggaactggtgtcctgaccgagagcaacaagaagttcctgcccttccagcagttcggaagggacatcgctgacaccactgacgctgtgcgcgaccctcagaccctggaaatcctggacatcactccatgctcattcggaggtgtctccgtgatcacccctggcaccaacacttctaaccaggtcgctgtgctgtaccaggacgtcaactgcaccgaggtccctgtggccatccacgctgaccagctgacccccacttggcgcgtgtactccaccggcagcaacgtgttccagactcgtgctggttgcctgatcggcgccgagcacgtgaacaacagctacgaatgcgacatccccatcggcgctggaatctgcgcctcttaccagacccagactaacagcccacagcaggctcagtctgtggcctctcagtcaatcatcgcttacaccatgtcactgggcgctgaaaactccgtggcctactctaacaactcaatcgccatccccaccaacttcactatcagcgtgaccactgagatcctgccagtcagcatgaccaagacttctgtggactgcactatgtacatctgcggagacagcaccgaatgctctaacctgctgctgcagtacggctctttctgcacccagctgaaccgtgctctgactggaatcgccgtggagcaggacaagaacactcaggaagtcttcgctcaggtgaagcaaatctacaagaccccacctatcaaggacttcggcggattcaacttctcccagatcctgcctgacccctccaagccaagcaagcgctctttcatcgaggacctgctgttcaacaaggtcactctggccgacgctggattcatcaagcagtacggagactgcctgggtgacatcgccgctcgtgacctgatctgcgctcagaagttcaacggtctgaccgtgctgcccccactgctgactgacgaaatgatcgcccagtacactagcgccctgctggctggaaccatcacttctggttggaccttcggtgctggcgccgctctgcagatccctttcgctatgcagatggcctaccgtttcaacggaatcggtgtcacccagaacgtgctgtacgagaaccagaagctgatcgctaaccagttcaactcagccatcggaaagatccaggacagcctgagctctactgcctctgctctgggcaagctgcaggacgtcgtgaaccagaacgcccaggctctgaacaccctggtcaagcagctgtcatccaacttcggtgctatcagctctgtgctgaacgacatcctgtcccgcctggacaaggtcgaggccgaagtgcagatcgaccgcctgatcactggccgtctgcagtcactgcagacctacgtgactcagcagctgatcagggccgctgaaatcagagcctccgctaacctggccgctaccaagatgagcgagtgcgtcctgggtcaatctaagcgtgtggacttctgcggcaagggataccacctgatgtcattccctcagtctgctccccacggtgtggtgttcctgcacgtcacctacgtgccagcccaggagaagaacttcaccactgcccctgctatctgccacgacggcaaggctcacttccccagggaaggtgtcttcgtgagcaacggcacccactggttcgtcactcagagaaacttctacgagccacagatcatcaccactgacaacactttcgtgtctggaaactgcgacgtggtcatcggtatcgtcaacaacaccgtgtacgaccccctgcagccagagctggactcattcaaggaggaactggacaagtacttcaagaaccacacctcccctgacgtcgacctgggcgacatctcaggaatcaacgcttccgtcgtgaacatccagaaggagatcgaccgcctgaacgaagtggccaagaacctgaacgaaagcctgatcgacctgcaggagctgggcaagtacgaacagtacatcaagtggccttggtacatctggctgggtttcatcgctggcctcatcgctatcgtgatggtgaccatcatgctgtgctgcatgacttcatgctgctcctgcctgaagggctgctgcagctgcggatcttgctgcaagttcgacgaggacgactctgaacccgtcctgaagggcgtgaagctgcactacacc

SEQ ID NO: 56 - protein, 1279 aa, Artificial Sequence
  RECOMBINANT SPIKE PROTEIN
MFVFLVLLPLVSSQCVNLTTRTQLPPAYTNSFTRGVYYPDKVFRSSVLHSTQDLFLPFFSNVTWFHAIHVSGTNGTKRFDNPVLPFNDGVYFASTEKSNIIRGWIFGTTLDSKTQSLLIVNNATNVVIKVCEFQFCNDPFLGVYYHKNNKSWMESEFRVYSSANNCTFEYVSQPFLMDLEGKQGNFKNLREFVFKNIDGYFKIYSKHTPINLVRDLPQGFSALEPLVDLPIGINITRFQTLLALHRSYLTPGDSSSGWTAGAAAYYVGYLQPRTFLLKYNENGTITDAVDCALDPLSETKCTLKSFTVEKGIYQTSNFRVQPTESIVRFPNITNLCPFGEVFNATRFASVYAWNRKRISNCVADYSVLYNSASFSTFKCYGVSPTKLNDLCFTNVYADSFVIRGDEVRQIAPGQTGKIADYNYKLPDDFTGCVIAWNSNNLDSKVGGNYNYLYRLFRKSNLKPFERDISTEIYQAGSTPCNGVEGFNCYFPLQSYGFQPTNGVGYQPYRVVVLSFELLHAPATVCGPKKSTNLVKNKCVNFNFNGLTGTGVLTESNKKFLPFQQFGRDIADTTDAVRDPQTLEILDITPCSFGGVSVITPGTNTSNQVAVLYQDVNCTEVPVAIHADQLTPTWRVYSTGSNVFQTRAGCLIGAEHVNNSYECDIPIGAGICASYQTQTNSPQQAQSVASQSIIAYTMSLGAENSVAYSNNSIAIPTNFTISVTTEILPVSMTKTSVDCTMYICGDSTECSNLLLQYGSFCTQLNRALTGIAVEQDKNTQEVFAQVKQIYKTPPIKDFGGFNFSQILPDPSKPSKRSFIEDLLFNKVTLADAGFIKQYGDCLGDIAARDLICAQKFNGLTVLPPLLTDEMIAQYTSALLAGTITSGWTFGAGAALQIPFAMQMAYRFNGIGVTQNVLYENQKLIANQFNSAIGKIQDSLSSTASALGKLQDVVNQNAQALNTLVKQLSSNFGAISSVLNDILSRLDKVEAEVQIDRLITGRLQSLQTYVTQQLIRAAEIRASANLAATKMSECVLGQSKRVDFCGKGYHLMSFPQSAPHGVVFLHVTYVPAQEKNFTTAPAICHDGKAHFPREGVFVSNGTHWFVTQRNFYEPQIITTDNTFVSGNCDVVIGIVNNTVYDPLQPELDSFKEELDKYFKNHTSPDVDLGDISGINASVVNIQKEIDRLNEVAKNLNESLIDLQELGKYEQYIKWPWYIWLGFIAGLIAIVMVTIMLCCMTSCCSCLKGCCSCGSCCKFDEDDSEPVLKGVKLHYTHHHHHH

SEQ ID NO: 57 - DNA, 3837 bp, Artificial Sequence
  RECOMBINANT SPIKE PROTEIN
atgttcgtcttcctggtgctgctgcccctggtgtccagccagtgcgtgaacctgaccactaggactcagctgcctcccgcttacaccaactcattcactcgcggtgtgtactaccctgacaaggtcttccgttcttcagtgctgcactcaactcaggacctgttcctgcccttcttctccaacgtcacctggttccacgccatccacgtgtccggcaccaacggcactaagcgcttcgacaacccagtgctgcctttcaacgacggtgtctacttcgcttcaaccgagaagtccaacatcatccgtggatggatcttcggcaccactctggacagcaagactcagtctctgctgatcgtcaacaacgccaccaacgtggtcatcaaggtctgcgaattccagttctgcaacgacccattcctgggcgtctactaccacaagaacaacaagtcatggatggagtccgaattccgcgtctactccagcgctaacaactgcactttcgagtacgtgtcccagcctttcctgatggacctggaaggaaagcagggtaacttcaagaacctgagggagttcgtgttcaagaacatcgacggatacttcaagatttacagcaagcacaccccaatcaacctggtgcgcgacctgcctcagggtttctctgctctggagccactggtggacctgcctatcggcatcaacatcacccgcttccagactctgctggctctgcaccgttcctacctgactccaggcgactcatcttctggatggactgctggagctgctgcttactacgtgggctacctgcagcctcgcaccttcctgctgaagtacaacgaaaacggaaccatcactgacgccgtcgactgcgctctggaccctctgtcagaaaccaagtgcactctgaagtccttcaccgtggagaagggcatctaccagacttcaaacttcagggtgcagcccaccgaatccatcgtcagattccctaacatcactaacctgtgccccttcggagaggtcttcaacgccacccgcttcgcttccgtgtacgcctggaacaggaagagaatctcaaactgcgtcgctgactactccgtgctgtacaactcagcctccttcagcaccttcaagtgctacggcgtgtcaccaactaagctgaacgacctgtgcttcaccaacgtctacgccgactccttcgtgatcaggggagacgaggtcagacagatcgctcctggccagactggaaagatcgccgactacaactacaagctgcccgacgacttcaccggttgcgtcatcgcttggaacagcaacaacctggactctaaagtgggtggcaactacaactacctgtaccgcctgttccgtaagtcaaacctgaagccattcgagagggacatcagcactgaaatctaccaggccggatctaccccttgcaacggtgtcgagggcttcaactgctacttccccctgcagtcctacggtttccagccaactaacggtgtgggctaccagccttacagagtggtcgtgctgagcttcgaactgctccacgctcctgctactgtgtgcggtccaaagaagtctaccaacctggtcaagaacaagtgcgtgaacttcaacttcaacggcctgaccggaactggtgtcctgaccgagagcaacaagaagttcctgcccttccagcagttcggaagggacatcgctgacaccactgacgctgtgcgcgaccctcagaccctggaaatcctggacatcactccatgctcattcggaggtgtctccgtgatcacccctggcaccaacacttctaaccaggtcgctgtgctgtaccaggacgtcaactgcaccgaggtccctgtggccatccacgctgaccagctgacccccacttggcgcgtgtactccaccggcagcaacgtgttccagactcgtgctggttgcctgatcggcgccgagcacgtgaacaacagctacgaatgcgacatccccatcggcgctggaatctgcgcctcttaccagacccagactaacagcccacagcaggctcagtctgtggcctctcagtcaatcatcgcttacaccatgtcactgggcgctgaaaactccgtggcctactctaacaactcaatcgccatccccaccaacttcactatcagcgtgaccactgagatcctgccagtcagcatgaccaagacttctgtggactgcactatgtacatctgcggagacagcaccgaatgctctaacctgctgctgcagtacggctctttctgcacccagctgaaccgtgctctgactggaatcgccgtggagcaggacaagaacactcaggaagtcttcgctcaggtgaagcaaatctacaagaccccacctatcaaggacttcggcggattcaacttctcccagatcctgcctgacccctccaagccaagcaagcgctctttcatcgaggacctgctgttcaacaaggtcactctggccgacgctggattcatcaagcagtacggagactgcctgggtgacatcgccgctcgtgacctgatctgcgctcagaagttcaacggtctgaccgtgctgcccccactgctgactgacgaaatgatcgcccagtacactagcgccctgctggctggaaccatcacttctggttggaccttcggtgctggcgccgctctgcagatccctttcgctatgcagatggcctaccgtttcaacggaatcggtgtcacccagaacgtgctgtacgagaaccagaagctgatcgctaaccagttcaactcagccatcggaaagatccaggacagcctgagctctactgcctctgctctgggcaagctgcaggacgtcgtgaaccagaacgcccaggctctgaacaccctggtcaagcagctgtcatccaacttcggtgctatcagctctgtgctgaacgacatcctgtcccgcctggacaaggtcgaggccgaagtgcagatcgaccgcctgatcactggccgtctgcagtcactgcagacctacgtgactcagcagctgatcagggccgctgaaatcagagcctccgctaacctggccgctaccaagatgagcgagtgcgtcctgggtcaatctaagcgtgtggacttctgcggcaagggataccacctgatgtcattccctcagtctgctccccacggtgtggtgttcctgcacgtcacctacgtgccagcccaggagaagaacttcaccactgcccctgctatctgccacgacggcaaggctcacttccccagggaaggtgtcttcgtgagcaacggcacccactggttcgtcactcagagaaacttctacgagccacagatcatcaccactgacaacactttcgtgtctggaaactgcgacgtggtcatcggtatcgtcaacaacaccgtgtacgaccccctgcagccagagctggactcattcaaggaggaactggacaagtacttcaagaaccacacctcccctgacgtcgacctgggcgacatctcaggaatcaacgcttccgtcgtgaacatccagaaggagatcgaccgcctgaacgaagtggccaagaacctgaacgaaagcctgatcgacctgcaggagctgggcaagtacgaacagtacatcaagtggccttggtacatctggctgggtttcatcgctggcctcatcgctatcgtgatggtgaccatcatgctgtgctgcatgacttcatgctgctcctgcctgaagggctgctgcagctgcggatcttgctgcaagttcgacgaggacgactctgaacccgtcctgaagggcgtgaagctgcactacacccaccaccaccaccaccac

SEQ ID NO: 58 - protein, 1266 aa, Artificial Sequence
  RECOMBINANT SPIKE PROTEIN
QCVNLTTRTQLPPAYTNSFTRGVYYPDKVFRSSVLHSTQDLFLPFFSNVTWFHAIHVSGTNGTKRFDNPVLPFNDGVYFASTEKSNIIRGWIFGTTLDSKTQSLLIVNNATNVVIKVCEFQFCNDPFLGVYYHKNNKSWMESEFRVYSSANNCTFEYVSQPFLMDLEGKQGNFKNLREFVFKNIDGYFKIYSKHTPINLVRDLPQGFSALEPLVDLPIGINITRFQTLLALHRSYLTPGDSSSGWTAGAAAYYVGYLQPRTFLLKYNENGTITDAVDCALDPLSETKCTLKSFTVEKGIYQTSNFRVQPTESIVRFPNITNLCPFGEVFNATRFASVYAWNRKRISNCVADYSVLYNSASFSTFKCYGVSPTKLNDLCFTNVYADSFVIRGDEVRQIAPGQTGKIADYNYKLPDDFTGCVIAWNSNNLDSKVGGNYNYLYRLFRKSNLKPFERDISTEIYQAGSTPCNGVEGFNCYFPLQSYGFQPTNGVGYQPYRVVVLSFELLHAPATVCGPKKSTNLVKNKCVNFNFNGLTGTGVLTESNKKFLPFQQFGRDIADTTDAVRDPQTLEILDITPCSFGGVSVITPGTNTSNQVAVLYQDVNCTEVPVAIHADQLTPTWRVYSTGSNVFQTRAGCLIGAEHVNNSYECDIPIGAGICASYQTQTNSPQQAQSVASQSIIAYTMSLGAENSVAYSNNSIAIPTNFTISVTTEILPVSMTKTSVDCTMYICGDSTECSNLLLQYGSFCTQLNRALTGIAVEQDKNTQEVFAQVKQIYKTPPIKDFGGFNFSQILPDPSKPSKRSFIEDLLFNKVTLADAGFIKQYGDCLGDIAARDLICAQKFNGLTVLPPLLTDEMIAQYTSALLAGTITSGWTFGAGAALQIPFAMQMAYRFNGIGVTQNVLYENQKLIANQFNSAIGKIQDSLSSTASALGKLQDVVNQNAQALNTLVKQLSSNFGAISSVLNDILSRLDKVEAEVQIDRLITGRLQSLQTYVTQQLIRAAEIRASANLAATKMSECVLGQSKRVDFCGKGYHLMSFPQSAPHGVVFLHVTYVPAQEKNFTTAPAICHDGKAHFPREGVFVSNGTHWFVTQRNFYEPQIITTDNTFVSGNCDVVIGIVNNTVYDPLQPELDSFKEELDKYFKNHTSPDVDLGDISGINASVVNIQKEIDRLNEVAKNLNESLIDLQELGKYEQYIKWPWYIWLGFIAGLIAIVMVTIMLCCMTSCCSCLKGCCSCGSCCKFDEDDSEPVLKGVKLHYTHHHHHH

SEQ ID NO: 59 - protein, 1219 aa, Artificial Sequence
  RECOMBINANT SPIKE PROTEIN
MFVFLVLLPLVSSQCVNLTTRTQLPPAYTNSFTRGVYYPDKVFRSSVLHSTQDLFLPFFSNVTWFHAIHVSGTNGTKRFDNPVLPFNDGVYFASTEKSNIIRGWIFGTTLDSKTQSLLIVNNATNVVIKVCEFQFCNDPFLGVYYHKNNKSWMESEFRVYSSANNCTFEYVSQPFLMDLEGKQGNFKNLREFVFKNIDGYFKIYSKHTPINLVRDLPQGFSALEPLVDLPIGINITRFQTLLALHRSYLTPGDSSSGWTAGAAAYYVGYLQPRTFLLKYNENGTITDAVDCALDPLSETKCTLKSFTVEKGIYQTSNFRVQPTESIVRFPNITNLCPFGEVFNATRFASVYAWNRKRISNCVADYSVLYNSASFSTFKCYGVSPTKLNDLCFTNVYADSFVIRGDEVRQIAPGQTGKIADYNYKLPDDFTGCVIAWNSNNLDSKVGGNYNYLYRLFRKSNLKPFERDISTEIYQAGSTPCNGVEGFNCYFPLQSYGFQPTNGVGYQPYRVVVLSFELLHAPATVCGPKKSTNLVKNKCVNFNFNGLTGTGVLTESNKKFLPFQQFGRDIADTTDAVRDPQTLEILDITPCSFGGVSVITPGTNTSNQVAVLYQDVNCTEVPVAIHADQLTPTWRVYSTGSNVFQTRAGCLIGAEHVNNSYECDIPIGAGICASYQTQTNSPQQAQSVASQSIIAYTMSLGAENSVAYSNNSIAIPTNFTISVTTEILPVSMTKTSVDCTMYICGDSTECSNLLLQYGSFCTQLNRALTGIAVEQDKNTQEVFAQVKQIYKTPPIKDFGGFNFSQILPDPSKPSKRSFIEDLLFNKVTLADAGFIKQYGDCLGDIAARDLICAQKFNGLTVLPPLLTDEMIAQYTSALLAGTITSGWTFGAGAALQIPFAMQMAYRFNGIGVTQNVLYENQKLIANQFNSAIGKIQDSLSSTASALGKLQDVVNQNAQALNTLVKQLSSNFGAISSVLNDILSRLDKVEAEVQIDRLITGRLQSLQTYVTQQLIRAAEIRASANLAATKMSECVLGQSKRVDFCGKGYHLMSFPQSAPHGVVFLHVTYVPAQEKNFTTAPAICHDGKAHFPREGVFVSNGTHWFVTQRNFYEPQIITTDNTFVSGNCDVVIGIVNNTVYDPLQPELDSFKEELDKYFKNHTSPDVDLGDISGINASVVNIQKEIDRLNEVAKNLNESLIDLQELGKYEQYIKWPHHHHHH

SEQ ID NO: 60 - DNA, 3657 bp, Artificial Sequence
  RECOMBINANT SPIKE PROTEIN
atgttcgtcttcctggtgctgctgcccctggtgtccagccagtgcgtgaacctgaccactaggactcagctgcctcccgcttacaccaactcattcactcgcggtgtgtactaccctgacaaggtcttccgttcttcagtgctgcactcaactcaggacctgttcctgcccttcttctccaacgtcacctggttccacgccatccacgtgtccggcaccaacggcactaagcgcttcgacaacccagtgctgcctttcaacgacggtgtctacttcgcttcaaccgagaagtccaacatcatccgtggatggatcttcggcaccactctggacagcaagactcagtctctgctgatcgtcaacaacgccaccaacgtggtcatcaaggtctgcgaattccagttctgcaacgacccattcctgggcgtctactaccacaagaacaacaagtcatggatggagtccgaattccgcgtctactccagcgctaacaactgcactttcgagtacgtgtcccagcctttcctgatggacctggaaggaaagcagggtaacttcaagaacctgagggagttcgtgttcaagaacatcgacggatacttcaagatttacagcaagcacaccccaatcaacctggtgcgcgacctgcctcagggtttctctgctctggagccactggtggacctgcctatcggcatcaacatcacccgcttccagactctgctggctctgcaccgttcctacctgactccaggcgactcatcttctggatggactgctggagctgctgcttactacgtgggctacctgcagcctcgcaccttcctgctgaagtacaacgaaaacggaaccatcactgacgccgtcgactgcgctctggaccctctgtcagaaaccaagtgcactctgaagtccttcaccgtggagaagggcatctaccagacttcaaacttcagggtgcagcccaccgaatccatcgtcagattccctaacatcactaacctgtgccccttcggagaggtcttcaacgccacccgcttcgcttccgtgtacgcctggaacaggaagagaatctcaaactgcgtcgctgactactccgtgctgtacaactcagcctccttcagcaccttcaagtgctacggcgtgtcaccaactaagctgaacgacctgtgcttcaccaacgtctacgccgactccttcgtgatcaggggagacgaggtcagacagatcgctcctggccagactggaaagatcgccgactacaactacaagctgcccgacgacttcaccggttgcgtcatcgcttggaacagcaacaacctggactctaaagtgggtggcaactacaactacctgtaccgcctgttccgtaagtcaaacctgaagccattcgagagggacatcagcactgaaatctaccaggccggatctaccccttgcaacggtgtcgagggcttcaactgctacttccccctgcagtcctacggtttccagccaactaacggtgtgggctaccagccttacagagtggtcgtgctgagcttcgaactgctccacgctcctgctactgtgtgcggtccaaagaagtctaccaacctggtcaagaacaagtgcgtgaacttcaacttcaacggcctgaccggaactggtgtcctgaccgagagcaacaagaagttcctgcccttccagcagttcggaagggacatcgctgacaccactgacgctgtgcgcgaccctcagaccctggaaatcctggacatcactccatgctcattcggaggtgtctccgtgatcacccctggcaccaacacttctaaccaggtcgctgtgctgtaccaggacgtcaactgcaccgaggtccctgtggccatccacgctgaccagctgacccccacttggcgcgtgtactccaccggcagcaacgtgttccagactcgtgctggttgcctgatcggcgccgagcacgtgaacaacagctacgaatgcgacatccccatcggcgctggaatctgcgcctcttaccagacccagactaacagcccacagcaggctcagtctgtggcctctcagtcaatcatcgcttacaccatgtcactgggcgctgaaaactccgtggcctactctaacaactcaatcgccatccccaccaacttcactatcagcgtgaccactgagatcctgccagtcagcatgaccaagacttctgtggactgcactatgtacatctgcggagacagcaccgaatgctctaacctgctgctgcagtacggctctttctgcacccagctgaaccgtgctctgactggaatcgccgtggagcaggacaagaacactcaggaagtcttcgctcaggtgaagcaaatctacaagaccccacctatcaaggacttcggcggattcaacttctcccagatcctgcctgacccctccaagccaagcaagcgctctttcatcgaggacctgctgttcaacaaggtcactctggccgacgctggattcatcaagcagtacggagactgcctgggtgacatcgccgctcgtgacctgatctgcgctcagaagttcaacggtctgaccgtgctgcccccactgctgactgacgaaatgatcgcccagtacactagcgccctgctggctggaaccatcacttctggttggaccttcggtgctggcgccgctctgcagatccctttcgctatgcagatggcctaccgtttcaacggaatcggtgtcacccagaacgtgctgtacgagaaccagaagctgatcgctaaccagttcaactcagccatcggaaagatccaggacagcctgagctctactgcctctgctctgggcaagctgcaggacgtcgtgaaccagaacgcccaggctctgaacaccctggtcaagcagctgtcatccaacttcggtgctatcagctctgtgctgaacgacatcctgtcccgcctggacaaggtcgaggccgaagtgcagatcgaccgcctgatcactggccgtctgcagtcactgcagacctacgtgactcagcagctgatcagggccgctgaaatcagagcctccgctaacctggccgctaccaagatgagcgagtgcgtcctgggtcaatctaagcgtgtggacttctgcggcaagggataccacctgatgtcattccctcagtctgctccccacggtgtggtgttcctgcacgtcacctacgtgccagcccaggagaagaacttcaccactgcccctgctatctgccacgacggcaaggctcacttccccagggaaggtgtcttcgtgagcaacggcacccactggttcgtcactcagagaaacttctacgagccacagatcatcaccactgacaacactttcgtgtctggaaactgcgacgtggtcatcggtatcgtcaacaacaccgtgtacgaccccctgcagccagagctggactcattcaaggaggaactggacaagtacttcaagaaccacacctcccctgacgtcgacctgggcgacatctcaggaatcaacgcttccgtcgtgaacatccagaaggagatcgaccgcctgaacgaagtggccaagaacctgaacgaaagcctgatcgacctgcaggagctgggcaagtacgaacagtacatcaagtggcctcaccaccaccaccaccac

SEQ ID NO: 61 - protein, 1205 aa, Artificial Sequence
  RECOMBINANT SPIKE PROTEIN
CVNLTTRTQLPPAYTNSFTRGVYYPDKVFRSSVLHSTQDLFLPFFSNVTWFHAIHVSGTNGTKRFDNPVLPFNDGVYFASTEKSNIIRGWIFGTTLDSKTQSLLIVNNATNVVIKVCEFQFCNDPFLGVYYHKNNKSWMESEFRVYSSANNCTFEYVSQPFLMDLEGKQGNFKNLREFVFKNIDGYFKIYSKHTPINLVRDLPQGFSALEPLVDLPIGINITRFQTLLALHRSYLTPGDSSSGWTAGAAAYYVGYLQPRTFLLKYNENGTITDAVDCALDPLSETKCTLKSFTVEKGIYQTSNFRVQPTESIVRFPNITNLCPFGEVFNATRFASVYAWNRKRISNCVADYSVLYNSASFSTFKCYGVSPTKLNDLCFTNVYADSFVIRGDEVRQIAPGQTGKIADYNYKLPDDFTGCVIAWNSNNLDSKVGGNYNYLYRLFRKSNLKPFERDISTEIYQAGSTPCNGVEGFNCYFPLQSYGFQPTNGVGYQPYRVVVLSFELLHAPATVCGPKKSTNLVKNKCVNFNFNGLTGTGVLTESNKKFLPFQQFGRDIADTTDAVRDPQTLEILDITPCSFGGVSVITPGTNTSNQVAVLYQDVNCTEVPVAIHADQLTPTWRVYSTGSNVFQTRAGCLIGAEHVNNSYECDIPIGAGICASYQTQTNSPQQAQSVASQSIIAYTMSLGAENSVAYSNNSIAIPTNFTISVTTEILPVSMTKTSVDCTMYICGDSTECSNLLLQYGSFCTQLNRALTGIAVEQDKNTQEVFAQVKQIYKTPPIKDFGGFNFSQILPDPSKPSKRSFIEDLLFNKVTLADAGFIKQYGDCLGDIAARDLICAQKFNGLTVLPPLLTDEMIAQYTSALLAGTITSGWTFGAGAALQIPFAMQMAYRFNGIGVTQNVLYENQKLIANQFNSAIGKIQDSLSSTASALGKLQDVVNQNAQALNTLVKQLSSNFGAISSVLNDILSRLDKVEAEVQIDRLITGRLQSLQTYVTQQLIRAAEIRASANLAATKMSECVLGQSKRVDFCGKGYHLMSFPQSAPHGVVFLHVTYVPAQEKNFTTAPAICHDGKAHFPREGVFVSNGTHWFVTQRNFYEPQIITTDNTFVSGNCDVVIGIVNNTVYDPLQPELDSFKEELDKYFKNHTSPDVDLGDISGINASVVNIQKEIDRLNEVAKNLNESLIDLQELGKYEQYIKWPHHHHHH

SEQ ID NO: 62 - protein, 1263 aa, Artificial Sequence
  RECOMBINANT SPIKE PROTEIN
MFVFLVLLPLVSSQCVNLTTRTQLPPAYTNSFTRGVYYPDKVFRSSVLHSTQDLFLPFFSNVTWFHAIHVSGTNGTKRFDNPVLPFNDGVYFASTEKSNIIRGWIFGTTLDSKTQSLLIVNNATNVVIKVCEFQFCNDPFLGVYYHKNNKSWMESEFRVYSSANNCTFEYVSQPFLMDLEGKQGNFKNLREFVFKNIDGYFKIYSKHTPINLVRDLPQGFSALEPLVDLPIGINITRFQTLLALHRSYLTPGDSSSGWTAGAAAYYVGYLQPRTFLLKYNENGTITDAVDCALDPLSETKCTLKSFTVEKGIYQTSNFRVQPTESIVRFPNITNLCPFGEVFNATRFASVYAWNRKRISNCVADYSVLYNSASFSTFKCYGVSPTKLNDLCFTNVYADSFVIRGDEVRQIAPGQTGKIADYNYKLPDDFTGCVIAWNSNNLDSKVGGNYNYLYRLFRKSNLKPFERDISTEIYQAGSTPCNGVEGFNCYFPLQSYGFQPTNGVGYQPYRVVVLSFELLHAPATVCGPKKSTNLVKNKCVNFNFNGLTGTGVLTESNKKFLPFQQFGRDIADTTDAVRDPQTLEILDITPCSFGGVSVITPGTNTSNQVAVLYQDVNCTEVPVAIHADQLTPTWRVYSTGSNVFQTRAGCLIGAEHVNNSYECDIPIGAGICASYQTQTNSPQQAQSVALGAENSVAYSNNSIAIPTNFTISVTTEILPVSMTKTSVDCTMYICGDSTECSNLLLQYGSFCTQLNRALTGIAVEQDKNTQEVFAQVKQIYKTPPIKDFGGFNFSQILPDPSKPSKRSFIEDLLFNKVTLADAGFIKQYGDCLGDIAARDLICAQKFNGLTVLPPLLTDEMIAQYTSALLAGTITSGWTFGAGAALQIPFAMQMAYRFNGIGVTQNVLYENQKLIANQFNSAIGKIQDSLSSTASALGKLQDVVNQNAQALNTLVKQLSSNFGAISSVLNDILSRLDKVEAEVQIDRLITGRLQSLQTYVTQQLIRAAEIRASANLAATKMSECVLGQSKRVDFCGKGYHLMSFPQSAPHGVVFLHVTYVPAQEKNFTTAPAICHDGKAHFPREGVFVSNGTHWFVTQRNFYEPQIITTDNTFVSGNCDVVIGIVNNTVYDPLQPELDSFKEELDKYFKNHTSPDVDLGDISGINASVVNIQKEIDRLNEVAKNLNESLIDLQELGKYEQYIKWPWYIWLGFIAGLIAIVMVTIMLCCMTSCCSCLKGCCSCGSCCKFDEDDSEPVLKGVKLHYT

SEQ ID NO: 63 - protein, 1250 aa, Artificial Sequence
  RECOMBINANT SPIKE PROTEIN
QCVNLTTRTQLPPAYTNSFTRGVYYPDKVFRSSVLHSTQDLFLPFFSNVTWFHAIHVSGTNGTKRFDNPVLPFNDGVYFASTEKSNIIRGWIFGTTLDSKTQSLLIVNNATNVVIKVCEFQFCNDPFLGVYYHKNNKSWMESEFRVYSSANNCTFEYVSQPFLMDLEGKQGNFKNLREFVFKNIDGYFKIYSKHTPINLVRDLPQGFSALEPLVDLPIGINITRFQTLLALHRSYLTPGDSSSGWTAGAAAYYVGYLQPRTFLLKYNENGTITDAVDCALDPLSETKCTLKSFTVEKGIYQTSNFRVQPTESIVRFPNITNLCPFGEVFNATRFASVYAWNRKRISNCVADYSVLYNSASFSTFKCYGVSPTKLNDLCFTNVYADSFVIRGDEVRQIAPGQTGKIADYNYKLPDDFTGCVIAWNSNNLDSKVGGNYNYLYRLFRKSNLKPFERDISTEIYQAGSTPCNGVEGFNCYFPLQSYGFQPTNGVGYQPYRVVVLSFELLHAPATVCGPKKSTNLVKNKCVNFNFNGLTGTGVLTESNKKFLPFQQFGRDIADTTDAVRDPQTLEILDITPCSFGGVSVITPGTNTSNQVAVLYQDVNCTEVPVAIHADQLTPTWRVYSTGSNVFQTRAGCLIGAEHVNNSYECDIPIGAGICASYQTQTNSPQQAQSVALGAENSVAYSNNSIAIPTNFTISVTTEILPVSMTKTSVDCTMYICGDSTECSNLLLQYGSFCTQLNRALTGIAVEQDKNTQEVFAQVKQIYKTPPIKDFGGFNFSQILPDPSKPSKRSFIEDLLFNKVTLADAGFIKQYGDCLGDIAARDLICAQKFNGLTVLPPLLTDEMIAQYTSALLAGTITSGWTFGAGAALQIPFAMQMAYRFNGIGVTQNVLYENQKLIANQFNSAIGKIQDSLSSTASALGKLQDVVNQNAQALNTLVKQLSSNFGAISSVLNDILSRLDKVEAEVQIDRLITGRLQSLQTYVTQQLIRAAEIRASANLAATKMSECVLGQSKRVDFCGKGYHLMSFPQSAPHGVVFLHVTYVPAQEKNFTTAPAICHDGKAHFPREGVFVSNGTHWFVTQRNFYEPQIITTDNTFVSGNCDVVIGIVNNTVYDPLQPELDSFKEELDKYFKNHTSPDVDLGDISGINASVVNIQKEIDRLNEVAKNLNESLIDLQELGKYEQYIKWPWYIWLGFIAGLIAIVMVTIMLCCMTSCCSCLKGCCSCGSCCKFDEDDSEPVLKGVKLHYT

SEQ ID NO: 64 - protein, 1263 aa, Artificial Sequence
  RECOMBINANT SPIKE PROTEIN
MFVFLVLLPLVSSQCVNLTTRTQLPPAYTNSFTRGVYYPDKVFRSSVLHSTQDLFLPFFSNVTWFHAIHVSGTNGTKRFDNPVLPFNDGVYFASTEKSNIIRGWIFGTTLDSKTQSLLIVNNATNVVIKVCEFQFCNDPFLGVYYHKNNKSWMESEFRVYSSANNCTFEYVSQPFLMDLEGKQGNFKNLREFVFKNIDGYFKIYSKHTPINLVRDLPQGFSALEPLVDLPIGINITRFQTLLALHRSYLTPGDSSSGWTAGAAAYYVGYLQPRTFLLKYNENGTITDAVDCALDPLSETKCTLKSFTVEKGIYQTSNFRVQPTESIVRFPNITNLCPFGEVFNATRFASVYAWNRKRISNCVADYSVLYNSASFSTFKCYGVSPTKLNDLCFTNVYADSFVIRGDEVRQIAPGQTGKIADYNYKLPDDFTGCVIAWNSNNLDSKVGGNYNYLYRLFRKSNLKPFERDISTEIYQAGSTPCNGVEGFNCYFPLQSYGFQPTNGVGYQPYRVVVLSFELLHAPATVCGPKKSTNLVKNKCVNFNFNGLTGTGVLTESNKKFLPFQQFGRDIADTTDAVRDPQTLEILDITPCSFGGVSVITPGTNTSNQVAVLYQDVNCTEVPVAIHADQLTPTWRVYSTGSNVFQTRAGCLIGAEHVNNSYECDIPIGAGICASYQTQTNSPQQAQSVASQSIIAYTMSLGAENSVAYSNNSIAIEILPVSMTKTSVDCTMYICGDSTECSNLLLQYGSFCTQLNRALTGIAVEQDKNTQEVFAQVKQIYKTPPIKDFGGFNFSQILPDPSKPSKRSFIEDLLFNKVTLADAGFIKQYGDCLGDIAARDLICAQKFNGLTVLPPLLTDEMIAQYTSALLAGTITSGWTFGAGAALQIPFAMQMAYRFNGIGVTQNVLYENQKLIANQFNSAIGKIQDSLSSTASALGKLQDVVNQNAQALNTLVKQLSSNFGAISSVLNDILSRLDKVEAEVQIDRLITGRLQSLQTYVTQQLIRAAEIRASANLAATKMSECVLGQSKRVDFCGKGYHLMSFPQSAPHGVVFLHVTYVPAQEKNFTTAPAICHDGKAHFPREGVFVSNGTHWFVTQRNFYEPQIITTDNTFVSGNCDVVIGIVNNTVYDPLQPELDSFKEELDKYFKNHTSPDVDLGDISGINASVVNIQKEIDRLNEVAKNLNESLIDLQELGKYEQYIKWPWYIWLGFIAGLIAIVMVTIMLCCMTSCCSCLKGCCSCGSCCKFDEDDSEPVLKGVKLHYT

SEQ ID NO: 65 - protein, 1250 aa, Artificial Sequence
  RECOMBINANT SPIKE PROTEIN
QCVNLTTRTQLPPAYTNSFTRGVYYPDKVFRSSVLHSTQDLFLPFFSNVTWFHAIHVSGTNGTKRFDNPVLPFNDGVYFASTEKSNIIRGWIFGTTLDSKTQSLLIVNNATNVVIKVCEFQFCNDPFLGVYYHKNNKSWMESEFRVYSSANNCTFEYVSQPFLMDLEGKQGNFKNLREFVFKNIDGYFKIYSKHTPINLVRDLPQGFSALEPLVDLPIGINITRFQTLLALHRSYLTPGDSSSGWTAGAAAYYVGYLQPRTFLLKYNENGTITDAVDCALDPLSETKCTLKSFTVEKGIYQTSNFRVQPTESIVRFPNITNLCPFGEVFNATRFASVYAWNRKRISNCVADYSVLYNSASFSTFKCYGVSPTKLNDLCFTNVYADSFVIRGDEVRQIAPGQTGKIADYNYKLPDDFTGCVIAWNSNNLDSKVGGNYNYLYRLFRKSNLKPFERDISTEIYQAGSTPCNGVEGFNCYFPLQSYGFQPTNGVGYQPYRVVVLSFELLHAPATVCGPKKSTNLVKNKCVNFNFNGLTGTGVLTESNKKFLPFQQFGRDIADTTDAVRDPQTLEILDITPCSFGGVSVITPGTNTSNQVAVLYQDVNCTEVPVAIHADQLTPTWRVYSTGSNVFQTRAGCLIGAEHVNNSYECDIPIGAGICASYQTQTNSPQQAQSVASQSIIAYTMSLGAENSVAYSNNSIAIEILPVSMTKTSVDCTMYICGDSTECSNLLLQYGSFCTQLNRALTGIAVEQDKNTQEVFAQVKQIYKTPPIKDFGGFNFSQILPDPSKPSKRSFIEDLLFNKVTLADAGFIKQYGDCLGDIAARDLICAQKFNGLTVLPPLLTDEMIAQYTSALLAGTITSGWTFGAGAALQIPFAMQMAYRFNGIGVTQNVLYENQKLIANQFNSAIGKIQDSLSSTASALGKLQDVVNQNAQALNTLVKQLSSNFGAISSVLNDILSRLDKVEAEVQIDRLITGRLQSLQTYVTQQLIRAAEIRASANLAATKMSECVLGQSKRVDFCGKGYHLMSFPQSAPHGVVFLHVTYVPAQEKNFTTAPAICHDGKAHFPREGVFVSNGTHWFVTQRNFYEPQIITTDNTFVSGNCDVVIGIVNNTVYDPLQPELDSFKEELDKYFKNHTSPDVDLGDISGINASVVNIQKEIDRLNEVAKNLNESLIDLQELGKYEQYIKWPWYIWLGFIAGLIAIVMVTIMLCCMTSCCSCLKGCCSCGSCCKFDEDDSEPVLKGVKLHYT

SEQ ID NO: 66 - protein, 1263 aa, Artificial Sequence
  RECOMBINANT SPIKE PROTEIN
MFVFLVLLPLVSSQCVNLTTRTQLPPAYTNSFTRGVYYPDKVFRSSVLHSTQDLFLPFFSNVTWFHAIHVSGTNGTKRFDNPVLPFNDGVYFASTEKSNIIRGWIFGTTLDSKTQSLLIVNNATNVVIKVCEFQFCNDPFLGVYYHKNNKSWMESEFRVYSSANNCTFEYVSQPFLMDLEGKQGNFKNLREFVFKNIDGYFKIYSKHTPINLVRDLPQGFSALEPLVDLPIGINITRFQTLLALHRSYLTPGDSSSGWTAGAAAYYVGYLQPRTFLLKYNENGTITDAVDCALDPLSETKCTLKSFTVEKGIYQTSNFRVQPTESIVRFPNITNLCPFGEVFNATRFASVYAWNRKRISNCVADYSVLYNSASFSTFKCYGVSPTKLNDLCFTNVYADSFVIRGDEVRQIAPGQTGKIADYNYKLPDDFTGCVIAWNSNNLDSKVGGNYNYLYRLFRKSNLKPFERDISTEIYQAGSTPCNGVEGFNCYFPLQSYGFQPTNGVGYQPYRVVVLSFELLHAPATVCGPKKSTNLVKNKCVNFNFNGLTGTGVLTESNKKFLPFQQFGRDIADTTDAVRDPQTLEILDITPCSFGGVSVITPGTNTSNQVAVLYQDVNCTEVPVAIHADQLTPTWRVYSTGSNVFQTRAGCLIGAEHVNNSYECDIPIGAGICASYQTQTNSPQQAQSVASQSIIAYTMSLGAENSVAYSNNSIAIPTNFTISVTTEILPVSMTKTSVDCTMYICGDSTECSNLLLQYGSFCTQLNRALTGIAVEQDKNTQEVFAQVKQIYKTPPIKDFGGFNFSQILPDPSKPSKRSFIADAGFIKQYGDCLGDIAARDLICAQKFNGLTVLPPLLTDEMIAQYTSALLAGTITSGWTFGAGAALQIPFAMQMAYRFNGIGVTQNVLYENQKLIANQFNSAIGKIQDSLSSTASALGKLQDVVNQNAQALNTLVKQLSSNFGAISSVLNDILSRLDKVEAEVQIDRLITGRLQSLQTYVTQQLIRAAEIRASANLAATKMSECVLGQSKRVDFCGKGYHLMSFPQSAPHGVVFLHVTYVPAQEKNFTTAPAICHDGKAHFPREGVFVSNGTHWFVTQRNFYEPQIITTDNTFVSGNCDVVIGIVNNTVYDPLQPELDSFKEELDKYFKNHTSPDVDLGDISGINASVVNIQKEIDRLNEVAKNLNESLIDLQELGKYEQYIKWPWYIWLGFIAGLIAIVMVTIMLCCMTSCCSCLKGCCSCGSCCKFDEDDSEPVLKGVKLHYT

SEQ ID NO: 67 - protein, 1250 aa, Artificial Sequence
  RECOMBINANT SPIKE PROTEIN
QCVNLTTRTQLPPAYTNSFTRGVYYPDKVFRSSVLHSTQDLFLPFFSNVTWFHAIHVSGTNGTKRFDNPVLPFNDGVYFASTEKSNIIRGWIFGTTLDSKTQSLLIVNNATNVVIKVCEFQFCNDPFLGVYYHKNNKSWMESEFRVYSSANNCTFEYVSQPFLMDLEGKQGNFKNLREFVFKNIDGYFKIYSKHTPINLVRDLPQGFSALEPLVDLPIGINITRFQTLLALHRSYLTPGDSSSGWTAGAAAYYVGYLQPRTFLLKYNENGTITDAVDCALDPLSETKCTLKSFTVEKGIYQTSNFRVQPTESIVRFPNITNLCPFGEVFNATRFASVYAWNRKRISNCVADYSVLYNSASFSTFKCYGVSPTKLNDLCFTNVYADSFVIRGDEVRQIAPGQTGKIADYNYKLPDDFTGCVIAWNSNNLDSKVGGNYNYLYRLFRKSNLKPFERDISTEIYQAGSTPCNGVEGFNCYFPLQSYGFQPTNGVGYQPYRVVVLSFELLHAPATVCGPKKSTNLVKNKCVNFNFNGLTGTGVLTESNKKFLPFQQFGRDIADTTDAVRDPQTLEILDITPCSFGGVSVITPGTNTSNQVAVLYQDVNCTEVPVAIHADQLTPTWRVYSTGSNVFQTRAGCLIGAEHVNNSYECDIPIGAGICASYQTQTNSPQQAQSVASQSIIAYTMSLGAENSVAYSNNSIAIPTNFTISVTTEILPVSMTKTSVDCTMYICGDSTECSNLLLQYGSFCTQLNRALTGIAVEQDKNTQEVFAQVKQIYKTPPIKDFGGFNFSQILPDPSKPSKRSFIADAGFIKQYGDCLGDIAARDLICAQKFNGLTVLPPLLTDEMIAQYTSALLAGTITSGWTFGAGAALQIPFAMQMAYRFNGIGVTQNVLYENQKLIANQFNSAIGKIQDSLSSTASALGKLQDVVNQNAQALNTLVKQLSSNFGAISSVLNDILSRLDKVEAEVQIDRLITGRLQSLQTYVTQQLIRAAEIRASANLAATKMSECVLGQSKRVDFCGKGYHLMSFPQSAPHGVVFLHVTYVPAQEKNFTTAPAICHDGKAHFPREGVFVSNGTHWFVTQRNFYEPQIITTDNTFVSGNCDVVIGIVNNTVYDPLQPELDSFKEELDKYFKNHTSPDVDLGDISGINASVVNIQKEIDRLNEVAKNLNESLIDLQELGKYEQYIKWPWYIWLGFIAGLIAIVMVTIMLCCMTSCCSCLKGCCSCGSCCKFDEDDSEPVLKGVKLHYT

SEQ ID NO: 68 - protein, 31 aa, Artificial Sequence
  Foldon
SAIGGYIPEAPRDGQAYVRKDGEWVLLSTFL

SEQ ID NO: 69 - protein, 202 aa, Betacoronavirus severe acute respiratory syndrome coronavirus 2
RFPNITNLCPFGEVFNATRFASVYAWNRKRISNCVADYSVLYNSASFSTFKCYGVSPTKLNDLCFTNVYADSFVIRGDEVRQIAPGQTGKIADYNYKLPDDFTGCVIAWNSNNLDSKVGGNYNYLYRLFRKSNLKPFERDISTEIYQAGSTPCNGVEGFNCYFPLQSYGFQPTNGVGYQPYRVVVLSFELLHAPATVCGPKK

SEQ ID NO: 70 - protein, 201 aa, Betacoronavirus Severe acute respiratory syndrome-related coronavirus
RFPNITNLCPFGEVFNATKFPSVYAWERKKISNCVADYSVLYNSTFFSTFKCYGVSATKLNDLCFSNVYADSFVVKGDDVRQIAPGQTGVIADYNYKLPDDFMGCVLAWNTRNIDATSTGNYNYKYRYLRHGKLRPFERDISNVPFSPDGKPCTPPALNCYWPLNDYGFYTTTGIGYQPYRVVVLSFELLNAPATVCGPKL

SEQ ID NO: 71 - protein, 239 aa, Betacoronavirus Middle East respiratory syndrome-related coronavirus
FEAKPSGSVVAEGVECDFSPLLSGTPPQVYNFKRLVFTNCNYNLTKLLSLFSVNDFTCSQISPAAIASNCYSSLILDYFSYPLSMKSDLSVSSAGPISQFNYKQSFSNPTCLILATVPHNLTTITKPLKYSYINKCSRLLSDDRTEVPQLVNANQYSPCVSIVPSTVWEDGDYYRKQLSPLEGGGWLVASGSTVAMTEQLQMGFGITVQYGTDTNSVCPKLEFANDTKIASQLGNCVEY

SEQ ID NO: 72 - protein, 544 aa, Artificial Sequence
  RECOMBINANT SPIKE PROTEIN
MFVFLVLLPLVSSRFPNITNLCPFGEVFNATRFASVYAWNRKRISNCVADYSVLYNSASFSTFKCYGVSPTKLNDLCFTNVYADSFVIRGDEVRQIAPGQTGKIADYNYKLPDDFTGCVIAWNSNNLDSKVGGNYNYLYRLFRKSNLKPFERDISTEIYQAGSTPCNGVEGFNCYFPLQSYGFQPTNGVGYQPYRVVVLSFELLHAPATVCGPKKSTNLVKNKCVNFNFNGLTGTGVLTESNKKFLPFQQFGRDIADTTDAVRDPQTLEILDITPCSFGGVSVITPGTNTSNQVAVLYQDVNCTERFPNITNLCPFGEVFNATRFASVYAWNRKRISNCVADYSVLYNSASFSTFKCYGVSPTKLNDLCFTNVYADSFVIRGDEVRQIAPGQTGKIADYNYKLPDDFTGCVIAWNSNNLDSKVGGNYNYLYRLFRKSNLKPFERDISTEIYQAGSTPCNGVEGFNCYFPLQSYGFQPTNGVGYQPYRVVVLSFELLHAPATVCGPKKSAIGGYIPEAPRDGQAYVRKDGEWVLLSTFLHHHHHH

SEQ ID NO: 73 - protein, 531 aa, Artificial Sequence
  RECOMBINANT SPIKE PROTEIN
RFPNITNLCPFGEVFNATRFASVYAWNRKRISNCVADYSVLYNSASFSTFKCYGVSPTKLNDLCFTNVYADSFVIRGDEVRQIAPGQTGKIADYNYKLPDDFTGCVIAWNSNNLDSKVGGNYNYLYRLFRKSNLKPFERDISTEIYQAGSTPCNGVEGFNCYFPLQSYGFQPTNGVGYQPYRVVVLSFELLHAPATVCGPKKSTNLVKNKCVNFNFNGLTGTGVLTESNKKFLPFQQFGRDIADTTDAVRDPQTLEILDITPCSFGGVSVITPGTNTSNQVAVLYQDVNCTERFPNITNLCPFGEVFNATRFASVYAWNRKRISNCVADYSVLYNSASFSTFKCYGVSPTKLNDLCFTNVYADSFVIRGDEVRQIAPGQTGKIADYNYKLPDDFTGCVIAWNSNNLDSKVGGNYNYLYRLFRKSNLKPFERDISTEIYQAGSTPCNGVEGFNCYFPLQSYGFQPTNGVGYQPYRVVVLSFELLHAPATVCGPKKSAIGGYIPEAPRDGQAYVRKDGEWVLLSTFLHHHHHH

SEQ ID NO: 74 - protein, 544 aa, Artificial Sequence; identical to SEQ ID NO: 72
  RECOMBINANT SPIKE PROTEIN

SEQ ID NO: 75 - protein, 531 aa, Artificial Sequence; identical to SEQ ID NO: 73
  RECOMBINANT SPIKE PROTEIN

SEQ ID NO: 76 - protein, 470 aa, Artificial Sequence
  RECOMBINANT SPIKE PROTEIN
MFVFLVLLPLVSSRFPNITNLCPFGEVFNATRFASVYAWNRKRISNCVADYSVLYNSASFSTFKCYGVSPTKLNDLCFTNVYADSFVIRGDEVRQIAPGQTGKIADYNYKLPDDFTGCVIAWNSNNLDSKVGGNYNYLYRLFRKSNLKPFERDISTEIYQAGSTPCNGVEGFNCYFPLQSYGFQPTNGVGYQPYRVVVLSFELLHAPATVCGPKKSGGGSGGGSGGGSGGGSRFPNITNLCPFGEVFNATKFPSVYAWERKKISNCVADYSVLYNSTFFSTFKCYGVSATKLNDLCFSNVYADSFVVKGDDVRQIAPGQTGVIADYNYKLPDDFMGCVLAWNTRNIDATSTGNYNYKYRYLRHGKLRPFERDISNVPFSPDGKPCTPPALNCYWPLNDYGFYTTTGIGYQPYRVVVLSFELLNAPATVCGPKLSAIGGYIPEAPRDGQAYVRKDGEWVLLSTFLHHHHHH

SEQ ID NO: 77 - protein, 464 aa, Artificial Sequence
  RECOMBINANT SPIKE PROTEIN
MFVFLVLLPLVSSRFPNITNLCPFGEVFNATRFASVYAWNRKRISNCVADYSVLYNSASFSTFKCYGVSPTKLNDLCFTNVYADSFVIRGDEVRQIAPGQTGKIADYNYKLPDDFTGCVIAWNSNNLDSKVGGNYNYLYRLFRKSNLKPFERDISTEIYQAGSTPCNGVEGFNCYFPLQSYGFQPTNGVGYQPYRVVVLSFELLHAPATVCGPKKSGGGSGGGSGGGSGGGSRFPNITNLCPFGEVFNATKFPSVYAWERKKISNCVADYSVLYNSTFFSTFKCYGVSATKLNDLCFSNVYADSFVVKGDDVRQIAPGQTGVIADYNYKLPDDFMGCVLAWNTRNIDATSTGNYNYKYRYLRHGKLRPFERDISNVPFSPDGKPCTPPALNCYWPLNDYGFYTTTGIGYQPYRVVVLSFELLNAPATVCGPKLSAIGGYIPEAPRDGQAYVRKDGEWVLLSTFL

SEQ ID NO: 78 - protein, 457 aa, Artificial Sequence
  RECOMBINANT SPIKE PROTEIN
RFPNITNLCPFGEVFNATRFASVYAWNRKRISNCVADYSVLYNSASFSTFKCYGVSPTKLNDLCFTNVYADSFVIRGDEVRQIAPGQTGKIADYNYKLPDDFTGCVIAWNSNNLDSKVGGNYNYLYRLFRKSNLKPFERDISTEIYQAGSTPCNGVEGFNCYFPLQSYGFQPTNGVGYQPYRVVVLSFELLHAPATVCGPKKSGGGSGGGSGGGSGGGSRFPNITNLCPFGEVFNATKFPSVYAWERKKISNCVADYSVLYNSTFFSTFKCYGVSATKLNDLCFSNVYADSFVVKGDDVRQIAPGQTGVIADYNYKLPDDFMGCVLAWNTRNIDATSTGNYNYKYRYLRHGKLRPFERDISNVPFSPDGKPCTPPALNCYWPLNDYGFYTTTGIGYQPYRVVVLSFELLNAPATVCGPKLSAIGGYIPEAPRDGQAYVRKDGEWVLLSTFLHHHHHH

SEQ ID NO: 79 - protein, 451 aa, Artificial Sequence
  RECOMBINANT SPIKE PROTEIN
RFPNITNLCPFGEVFNATRFASVYAWNRKRISNCVADYSVLYNSASFSTFKCYGVSPTKLNDLCFTNVYADSFVIRGDEVRQIAPGQTGKIADYNYKLPDDFTGCVIAWNSNNLDSKVGGNYNYLYRLFRKSNLKPFERDISTEIYQAGSTPCNGVEGFNCYFPLQSYGFQPTNGVGYQPYRVVVLSFELLHAPATVCGPKKSGGGSGGGSGGGSGGGSRFPNITNLCPFGEVFNATKFPSVYAWERKKISNCVADYSVLYNSTFFSTFKCYGVSATKLNDLCFSNVYADSFVVKGDDVRQIAPGQTGVIADYNYKLPDDFMGCVLAWNTRNIDATSTGNYNYKYRYLRHGKLRPFERDISNVPFSPDGKPCTPPALNCYWPLNDYGFYTTTGIGYQPYRVVVLSFELLNAPATVCGPKLSAIGGYIPEAPRDGQAYVRKDGEWVLLSTFL

SEQ ID NO: 80 - protein, 726 aa, Artificial Sequence
  RECOMBINANT SPIKE PROTEIN
MFVFLVLLPLVSSRFPNITNLCPFGEVFNATRFASVYAWNRKRISNCVADYSVLYNSASFSTFKCYGVSPTKLNDLCFTNVYADSFVIRGDEVRQIAPGQTGKIADYNYKLPDDFTGCVIAWNSNNLDSKVGGNYNYLYRLFRKSNLKPFERDISTEIYQAGSTPCNGVEGFNCYFPLQSYGFQPTNGVGYQPYRVVVLSFELLHAPATVCGPKKSGGGSGGGSGGGSGGGSFEAKPSGSVVAEGVECDFSPLLSGTPPQVYNFKRLVFTNCNYNLTKLLSLFSVNDFTCSQISPAAIASNCYSSLILDYFSYPLSMKSDLSVSSAGPISQFNYKQSFSNPTCLILATVPHNLTTITKPLKYSYINKCSRLLSDDRTEVPQLVNANQYSPCVSIVPSTVWEDGDYYRKQLSPLEGGGWLVASGSTVAMTEQLQMGFGITVQYGTDTNSVCPKLEFANDTKIASQLGNCVEYSGGGSGGGSGGGSGGGSRFPNITNLCPFGEVFNATKFPSVYAWERKKISNCVADYSVLYNSTFFSTFKCYGVSATKLNDLCFSNVYADSFVVKGDDVRQIAPGQTGVIADYNYKLPDDFMGCVLAWNTRNIDATSTGNYNYKYRYLRHGKLRPFERDISNVPFSPDGKPCTPPALNCYWPLNDYGFYTTTGIGYQPYRVVVLSFELLNAPATVCGPKLSAIGGYIPEAPRDGQAYVRKDGEWVLLSTFLHHHHHH

SEQ ID NO: 81 - protein, 720 aa, Artificial Sequence
  RECOMBINANT SPIKE PROTEIN
MFVFLVLLPLVSSRFPNITNLCPFGEVFNATRFASVYAWNRKRISNCVADYSVLYNSASFSTFKCYGVSPTKLNDLCFTNVYADSFVIRGDEVRQIAPGQTGKIADYNYKLPDDFTGCVIAWNSNNLDSKVGGNYNYLYRLFRKSNLKPFERDISTEIYQAGSTPCNGVEGFNCYFPLQSYGFQPTNGVGYQPYRVVVLSFELLHAPATVCGPKKSGGGSGGGSGGGSGGGSFEAKPSGSVVAEGVECDFSPLLSGTPPQVYNFKRLVFTNCNYNLTKLLSLFSVNDFTCSQISPAAIASNCYSSLILDYFSYPLSMKSDLSVSSAGPISQFNYKQSFSNPTCLILATVPHNLTTITKPLKYSYINKCSRLLSDDRTEVPQLVNANQYSPCVSIVPSTVWEDGDYYRKQLSPLEGGGWLVASGSTVAMTEQLQMGFGITVQYGTDTNSVCPKLEFANDTKIASQLGNCVEYSGGGSGGGSGGGSGGGSRFPNITNLCPFGEVFNATKFPSVYAWERKKISNCVADYSVLYNSTFFSTFKCYGVSATKLNDLCFSNVYADSFVVKGDDVRQIAPGQTGVIADYNYKLPDDFMGCVLAWNTRNIDATSTGNYNYKYRYLRHGKLRPFERDISNVPFSPDGKPCTPPALNCYWPLNDYGFYTTTGIGYQPYRVVVLSFELLNAPATVCGPKLSAIGGYIPEAPRDGQAYVRKDGEWVLLSTFL

SEQ ID NO: 82 - protein, 713 aa, Artificial Sequence
  RECOMBINANT SPIKE PROTEIN
RFPNITNLCPFGEVFNATRFASVYAWNRKRISNCVADYSVLYNSASFSTFKCYGVSPTKLNDLCFTNVYADSFVIRGDEVRQIAPGQTGKIADYNYKLPDDFTGCVIAWNSNNLDSKVGGNYNYLYRLFRKSNLKPFERDISTEIYQAGSTPCNGVEGFNCYFPLQSYGFQPTNGVGYQPYRVVVLSFELLHAPATVCGPKKSGGGSGGGSGGGSGGGSFEAKPSGSVVAEGVECDFSPLLSGTPPQVYNFKRLVFTNCNYNLTKLLSLFSVNDFTCSQISPAAIASNCYSSLILDYFSYPLSMKSDLSVSSAGPISQFNYKQSFSNPTCLILATVPHNLTTITKPLKYSYINKCSRLLSDDRTEVPQLVNANQYSPCVSIVPSTVWEDGDYYRKQLSPLEGGGWLVASGSTVAMTEQLQMGFGITVQYGTDTNSVCPKLEFANDTKIASQLGNCVEYSGGGSGGGSGGGSGGGSRFPNITNLCPFGEVFNATKFPSVYAWERKKISNCVADYSVLYNSTFFSTFKCYGVSATKLNDLCFSNVYADSFVVKGDDVRQIAPGQTGVIADYNYKLPDDFMGCVLAWNTRNIDATSTGNYNYKYRYLRHGKLRPFERDISNVPFSPDGKPCTPPALNCYWPLNDYGFYTTTGIGYQPYRVVVLSFELLNAPATVCGPKLSAIGGYIPEAPRDGQAYVRKDGEWVLLSTFLHHHHHH

SEQ ID NO: 83 - protein, 707 aa, Artificial Sequence
  RECOMBINANT SPIKE PROTEIN
RFPNITNLCPFGEVFNATRFASVYAWNRKRISNCVADYSVLYNSASFSTFKCYGVSPTKLNDLCFTNVYADSFVIRGDEVRQIAPGQTGKIADYNYKLPDDFTGCVIAWNSNNLDSKVGGNYNYLYRLFRKSNLKPFERDISTEIYQAGSTPCNGVEGFNCYFPLQSYGFQPTNGVGYQPYRVVVLSFELLHAPATVCGPKKSGGGSGGGSGGGSGGGSFEAKPSGSVVAEGVECDFSPLLSGTPPQVYNFKRLVFTNCNYNLTKLLSLFSVNDFTCSQISPAAIASNCYSSLILDYFSYPLSMKSDLSVSSAGPISQFNYKQSFSNPTCLILATVPHNLTTITKPLKYSYINKCSRLLSDDRTEVPQLVNANQYSPCVSIVPSTVWEDGDYYRKQLSPLEGGGWLVASGSTVAMTEQLQMGFGITVQYGTDTNSVCPKLEFANDTKIASQLGNCVEYSGGGSGGGSGGGSGGGSRFPNITNLCPFGEVFNATKFPSVYAWERKKISNCVADYSVLYNSTFFSTFKCYGVSATKLNDLCFSNVYADSFVVKGDDVRQIAPGQTGVIADYNYKLPDDFMGCVLAWNTRNIDATSTGNYNYKYRYLRHGKLRPFERDISNVPFSPDGKPCTPPALNCYWPLNDYGFYTTTGIGYQPYRVVVLSFELLNAPATVCGPKLSAIGGYIPEAPRDGQAYVRKDGEWVLLSTFL

SEQ ID NO: 84 - protein, 1273 aa, Artificial Sequence
  RECOMBINANT SPIKE PROTEIN
MFVFLVLLPLVSSQCVNLTTRTQLPPAYTNSFTRGVYYPDKVFRSSVLHSTQDLFLPFFSNVTWFHAIHVSGTNGTKRFDNPVLPFNDGVYFASTEKSNIIRGWIFGTTLDSKTQSLLIVNNATNVVIKVCEFQFCNDPFLGVYYHKNNKSWMESEFRVYSSANNCTFEYVSQPFLMDLEGKQGNFKNLREFVFKNIDGYFKIYSKHTPINLVRDLPQGFSALEPLVDLPIGINITRFQTLLALHRSYLTPGDSSSGWTAGAAAYYVGYLQPRTFLLKYNENGTITDAVDCALDPLSETKCTLKSFTVEKGIYQTSNFRVQPTESIVRFPNITNLCPFGEVFNATRFASVYAWNRKRISNCVADYSVLYNSASFSTFKCYGVSPTKLNDLCFTNVYADSFVIRGDEVRQIAPGQTGKIADYNYKLPDDFTGCVIAWNSNNLDSKVGGNYNYLYRLFRKSNLKPFERDISTEIYQAGSTPCNGVEGFNCYFPLQSYGFQPTNGVGYQPYRVVVLSFELLHAPATVCGPKKSTNLVKNKCVNFNFNGLTGTGVLTESNKKFLPFQQFGRDIADTTDAVRDPQTLEILDITPCSFGGVSVITPGTNTSNQVAVLYQDVNCTEVPVAIHADQLTPTWRVYSTGSNVFQTRAGCLIGAEHVNNSYECDIPIGAGICASYQTQTNSPRRARSVASQSIIAYTMSLGAENSVAYSNNSIAIPTNFTISVTTEILPVSMTKTSVDCTMYICGDSTECSNLLLQYGSFCTQLNRALTGIAVEQDKNTQEVFAQVKQIYKTPPIKDFGGFNFSQILPDPSKPSKRSFIEDLLFNKVTLADAGFIKQYGDCLGDIAARDLICAQKFNGLTVLPPLLTDEMIAQYTSALLAGTITSGWTFGAGAALQIPFAMQMAYRFNGIGVTQNVLYENQKLIANQFNSAIGKIQDSLSSTASALGKLQDVVNQNAQALNTLVKQLSSNFGAISSVLNDILSRLDPPEAEVQIDRLITGRLQSLQTYVTQQLIRAAEIRASANLAATKMSECVLGQSKRVDFCGKGYHLMSFPQSAPHGVVFLHVTYVPAQEKNFTTAPAICHDGKAHFPREGVFVSNGTHWFVTQRNFYEPQIITTDNTFVSGNCDVVIGIVNNTVYDPLQPELDSFKEELDKYFKNHTSPDVDLGDISGINASVVNIQKEIDRLNEVAKNLNESLIDLQELGKYEQYIKWPWYIWLGFIAGLIAIVMVTIMLCCMTSCCSCLKGCCSCGSCCKFDEDDSEPVLKGVKLHYT

SEQ ID NO: 85 - protein, 1260 aa, Artificial Sequence
  RECOMBINANT SPIKE PROTEIN
QCVNLTTRTQLPPAYTNSFTRGVYYPDKVFRSSVLHSTQDLFLPFFSNVTWFHAIHVSGTNGTKRFDNPVLPFNDGVYFASTEKSNIIRGWIFGTTLDSKTQSLLIVNNATNVVIKVCEFQFCNDPFLGVYYHKNNKSWMESEFRVYSSANNCTFEYVSQPFLMDLEGKQGNFKNLREFVFKNIDGYFKIYSKHTPINLVRDLPQGFSALEPLVDLPIGINITRFQTLLALHRSYLTPGDSSSGWTAGAAAYYVGYLQPRTFLLKYNENGTITDAVDCALDPLSETKCTLKSFTVEKGIYQTSNFRVQPTESIVRFPNITNLCPFGEVFNATRFASVYAWNRKRISNCVADYSVLYNSASFSTFKCYGVSPTKLNDLCFTNVYADSFVIRGDEVRQIAPGQTGKIADYNYKLPDDFTGCVIAWNSNNLDSKVGGNYNYLYRLFRKSNLKPFERDISTEIYQAGSTPCNGVEGFNCYFPLQSYGFQPTNGVGYQPYRVVVLSFELLHAPATVCGPKKSTNLVKNKCVNFNFNGLTGTGVLTESNKKFLPFQQFGRDIADTTDAVRDPQTLEILDITPCSFGGVSVITPGTNTSNQVAVLYQDVNCTEVPVAIHADQLTPTWRVYSTGSNVFQTRAGCLIGAEHVNNSYECDIPIGAGICASYQTQTNSPRRARSVASQSIIAYTMSLGAENSVAYSNNSIAIPTNFTISVTTEILPVSMTKTSVDCTMYICGDSTECSNLLLQYGSFCTQLNRALTGIAVEQDKNTQEVFAQVKQIYKTPPIKDFGGFNFSQILPDPSKPSKRSFIEDLLFNKVTLADAGFIKQYGDCLGDIAARDLICAQKFNGLTVLPPLLTDEMIAQYTSALLAGTITSGWTFGAGAALQIPFAMQMAYRFNGIGVTQNVLYENQKLIANQFNSAIGKIQDSLSSTASALGKLQDVVNQNAQALNTLVKQLSSNFGAISSVLNDILSRLDPPEAEVQIDRLITGRLQSLQTYVTQQLIRAAEIRASANLAATKMSECVLGQSKRVDFCGKGYHLMSFPQSAPHGVVFLHVTYVPAQEKNFTTAPAICHDGKAHFPREGVFVSNGTHWFVTQRNFYEPQIITTDNTFVSGNCDVVIGIVNNTVYDPLQPELDSFKEELDKYFKNHTSPDVDLGDISGINASVVNIQKEIDRLNEVAKNLNESLIDLQELGKYEQYIKWPWYIWLGFIAGLIAIVMVTIMLCCMTSCCSCLKGCCSCGSCCKFDEDDSEPVLKGVKLHYT

SEQ ID NO: 86 - protein, 1273 aa, Artificial Sequence
  RECOMBINANT SPIKE PROTEIN
MFVFLVLLPLVSSQCVNLTTRTQLPPAYTNSFTRGVYYPDKVFRSSVLHSTQDLFLPFFSNVTWFHAIHVSGTNGTKRFDNPVLPFNDGVYFASTEKSNIIRGWIFGTTLDSKTQSLLIVNNATNVVIKVCEFQFCNDPFLGVYYHKNNKSWMESEFRVYSSANNCTFEYVSQPFLMDLEGKQGNFKNLREFVFKNIDGYFKIYSKHTPINLVRDLPQGFSALEPLVDLPIGINITRFQTLLALHRSYLTPGDSSSGWTAGAAAYYVGYLQPRTFLLKYNENGTITDAVDCALDPLSETKCTLKSFTVEKGIYQTSNFRVQPTESIVRFPNITNLCPFGEVFNATRFASVYAWNRKRISNCVADYSVLYNSASFSTFKCYGVSPTKLNDLCFTNVYADSFVIRGDEVRQIAPGQTGKIADYNYKLPDDFTGCVIAWNSNNLDSKVGGNYNYLYRLFRKSNLKPFERDISTEIYQAGSTPCNGVEGFNCYFPLQSYGFQPTNGVGYQPYRVVVLSFELLHAPATVCGPKKSTNLVKNKCVNFNFNGLTGTGVLTESNKKFLPFQQFGRDIADTTDAVRDPQTLEILDITPCSFGGVSVITPGTNTSNQVAVLYQDVNCTEVPVAIHADQLTPTWRVYSTGSNVFQTRAGCLIGAEHVNNSYECDIPIGAGICASYQTQTNSPQQAQSVASQSIIAYTMSLGAENSVAYSNNSIAIPTNFTISVTTEILPVSMTKTSVDCTMYICGDSTECSNLLLQYGSFCTQLNRALTGIAVEQDKNTQEVFAQVKQIYKTPPIKDFGGFNFSQILPDPSKPSKRSFIEDLLFNKVTLADAGFIKQYGDCLGDIAARDLICAQKFNGLTVLPPLLTDEMIAQYTSALLAGTITSGWTFGAGAALQIPFAMQMAYRFNGIGVTQNVLYENQKLIANQFNSAIGKIQDSLSSTASALGKLQDVVNQNAQALNTLVKQLSSNFGAISSVLNDILSRLDPPEAEVQIDRLITGRLQSLQTYVTQQLIRAAEIRASANLAATKMSECVLGQSKRVDFCGKGYHLMSFPQSAPHGVVFLHVTYVPAQEKNFTTAPAICHDGKAHFPREGVFVSNGTHWFVTQRNFYEPQIITTDNTFVSGNCDVVIGIVNNTVYDPLQPELDSFKEELDKYFKNHTSPDVDLGDISGINASVVNIQKEIDRLNEVAKNLNESLIDLQELGKYEQYIKWPWYIWLGFIAGLIAIVMVTIMLCCMTSCCSCLKGCCSCGSCCKFDEDDSEPVLKGVKLHYT

SEQ ID NO: 87 - protein, 1260 aa, Artificial Sequence
  RECOMBINANT SPIKE PROTEIN
QCVNLTTRTQLPPAYTNSFTRGVYYPDKVFRSSVLHSTQDLFLPFFSNVTWFHAIHVSGTNGTKRFDNPVLPFNDGVYFASTEKSNIIRGWIFGTTLDSKTQSLLIVNNATNVVIKVCEFQFCNDPFLGVYYHKNNKSWMESEFRVYSSANNCTFEYVSQPFLMDLEGKQGNFKNLREFVFKNIDGYFKIYSKHTPINLVRDLPQGFSALEPLVDLPIGINITRFQTLLALHRSYLTPGDSSSGWTAGAAAYYVGYLQPRTFLLKYNENGTITDAVDCALDPLSETKCTLKSFTVEKGIYQTSNFRVQPTESIVRFPNITNLCPFGEVFNATRFASVYAWNRKRISNCVADYSVLYNSASFSTFKCYGVSPTKLNDLCFTNVYADSFVIRGDEVRQIAPGQTGKIADYNYKLPDDFTGCVIAWNSNNLDSKVGGNYNYLYRLFRKSNLKPFERDISTEIYQAGSTPCNGVEGFNCYFPLQSYGFQPTNGVGYQPYRVVVLSFELLHAPATVCGPKKSTNLVKNKCVNFNFNGLTGTGVLTESNKKFLPFQQFGRDIADTTDAVRDPQTLEILDITPCSFGGVSVITPGTNTSNQVAVLYQDVNCTEVPVAIHADQLTPTWRVYSTGSNVFQTRAGCLIGAEHVNNSYECDIPIGAGICASYQTQTNSPQQAQSVASQSIIAYTMSLGAENSVAYSNNSIAIPTNFTISVTTEILPVSMTKTSVDCTMYICGDSTECSNLLLQYGSFCTQLNRALTGIAVEQDKNTQEVFAQVKQIYKTPPIKDFGGFNFSQILPDPSKPSKRSFIEDLLFNKVTLADAGFIKQYGDCLGDIAARDLICAQKFNGLTVLPPLLTDEMIAQYTSALLAGTITSGWTFGAGAALQIPFAMQMAYRFNGIGVTQNVLYENQKLIANQFNSAIGKIQDSLSSTASALGKLQDVVNQNAQALNTLVKQLSSNFGAISSVLNDILSRLDPPEAEVQIDRLITGRLQSLQTYVTQQLIRAAEIRASANLAATKMSECVLGQSKRVDFCGKGYHLMSFPQSAPHGVVFLHVTYVPAQEKNFTTAPAICHDGKAHFPREGVFVSNGTHWFVTQRNFYEPQIITTDNTFVSGNCDVVIGIVNNTVYDPLQPELDSFKEELDKYFKNHTSPDVDLGDISGINASVVNIQKEIDRLNEVAKNLNESLIDLQELGKYEQYIKWPWYIWLGFIAGLIAIVMVTIMLCCMTSCCSCLKGCCSCGSCCKFDEDDSEPVLKGVKLHYT

SEQ ID NO: 88 - protein, 1219 aa, Artificial Sequence
  RECOMBINANT SPIKE PROTEIN
MFVFLVLLPLVSSQCVNLTTRTQLPPAYTNSFTRGVYYPDKVFRSSVLHSTQDLFLPFFSNVTWFHAIHVSGTNGTKRFDNPVLPFNDGVYFASTEKSNIIRGWIFGTTLDSKTQSLLIVNNATNVVIKVCEFQFCNDPFLGVYYHKNNKSWMESEFRVYSSANNCTFEYVSQPFLMDLEGKQGNFKNLREFVFKNIDGYFKIYSKHTPINLVRDLPQGFSALEPLVDLPIGINITRFQTLLALHRSYLTPGDSSSGWTAGAAAYYVGYLQPRTFLLKYNENGTITDAVDCALDPLSETKCTLKSFTVEKGIYQTSNFRVQPTESIVRFPNITNLCPFGEVFNATRFASVYAWNRKRISNCVADYSVLYNSASFSTFKCYGVSPTKLNDLCFTNVYADSFVIRGDEVRQIAPGQTGKIADYNYKLPDDFTGCVIAWNSNNLDSKVGGNYNYLYRLFRKSNLKPFERDISTEIYQAGSTPCNGVEGFNCYFPLQSYGFQPTNGVGYQPYRVVVLSFELLHAPATVCGPKKSTNLVKNKCVNFNFNGLTGTGVLTESNKKFLPFQQFGRDIADTTDAVRDPQTLEILDITPCSFGGVSVITPGTNTSNQVAVLYQDVNCTEVPVAIHADQLTPTWRVYSTGSNVFQTRAGCLIGAEHVNNSYECDIPIGAGICASYQTQTNSPQQAQSVASQSIIAYTMSLGAENSVAYSNNSIAIPTNFTISVTTEILPVSMTKTSVDCTMYICGDSTECSNLLLQYGSFCTQLNRALTGIAVEQDKNTQEVFAQVKQIYKTPPIKDFGGFNFSQILPDPSKPSKRSFIEDLLFNKVTLADAGFIKQYGDCLGDIAARDLICAQKFNGLTVLPPLLTDEMIAQYTSALLAGTITSGWTFGAGAALQIPFAMQMAYRFNGIGVTQNVLYENQKLIANQFNSAIGKIQDSLSSTASALGKLQDVVNQNAQALNTLVKQLSSNFGAISSVLNDILSRLDPPEAEVQIDRLITGRLQSLQTYVTQQLIRAAEIRASANLAATKMSECVLGQSKRVDFCGKGYHLMSFPQSAPHGVVFLHVTYVPAQEKNFTTAPAICHDGKAHFPREGVFVSNGTHWFVTQRNFYEPQIITTDNTFVSGNCDVVIGIVNNTVYDPLQPELDSFKEELDKYFKNHTSPDVDLGDISGINASVVNIQKEIDRLNEVAKNLNESLIDLQELGKYEQYIKWPHHHHHH

SEQ ID NO: 89 - protein, 1206 aa, Artificial Sequence
  RECOMBINANT SPIKE PROTEIN
QCVNLTTRTQLPPAYTNSFTRGVYYPDKVFRSSVLHSTQDLFLPFFSNVTWFHAIHVSGTNGTKRFDNPVLPFNDGVYFASTEKSNIIRGWIFGTTLDSKTQSLLIVNNATNVVIKVCEFQFCNDPFLGVYYHKNNKSWMESEFRVYSSANNCTFEYVSQPFLMDLEGKQGNFKNLREFVFKNIDGYFKIYSKHTPINLVRDLPQGFSALEPLVDLPIGINITRFQTLLALHRSYLTPGDSSSGWTAGAAAYYVGYLQPRTFLLKYNENGTITDAVDCALDPLSETKCTLKSFTVEKGIYQTSNFRVQPTESIVRFPNITNLCPFGEVFNATRFASVYAWNRKRISNCVADYSVLYNSASFSTFKCYGVSPTKLNDLCFTNVYADSFVIRGDEVRQIAPGQTGKIADYNYKLPDDFTGCVIAWNSNNLDSKVGGNYNYLYRLFRKSNLKPFERDISTEIYQAGSTPCNGVEGFNCYFPLQSYGFQPTNGVGYQPYRVVVLSFELLHAPATVCGPKKSTNLVKNKCVNFNFNGLTGTGVLTESNKKFLPFQQFGRDIADTTDAVRDPQTLEILDITPCSFGGVSVITPGTNTSNQVAVLYQDVNCTEVPVAIHADQLTPTWRVYSTGSNVFQTRAGCLIGAEHVNNSYECDIPIGAGICASYQTQTNSPQQAQSVASQSIIAYTMSLGAENSVAYSNNSIAIPTNFTISVTTEILPVSMTKTSVDCTMYICGDSTECSNLLLQYGSFCTQLNRALTGIAVEQDKNTQEVFAQVKQIYKTPPIKDFGGFNFSQILPDPSKPSKRSFIEDLLFNKVTLADAGFIKQYGDCLGDIAARDLICAQKFNGLTVLPPLLTDEMIAQYTSALLAGTITSGWTFGAGAALQIPFAMQMAYRFNGIGVTQNVLYENQKLIANQFNSAIGKIQDSLSSTASALGKLQDVVNQNAQALNTLVKQLSSNFGAISSVLNDILSRLDPPEAEVQIDRLITGRLQSLQTYVTQQLIRAAEIRASANLAATKMSECVLGQSKRVDFCGKGYHLMSFPQSAPHGVVFLHVTYVPAQEKNFTTAPAICHDGKAHFPREGVFVSNGTHWFVTQRNFYEPQIITTDNTFVSGNCDVVIGIVNNTVYDPLQPELDSFKEELDKYFKNHTSPDVDLGDISGINASVVNIQKEIDRLNEVAKNLNESLIDLQELGKYEQYIKWPHHHHHH

SEQ ID NO: 90 - protein, 17 aa, Artificial Sequence
  Linker
SGGGSGGGSGGGSGGGS

SEQ ID NO: 91 - protein, 4 aa, Artificial Sequence
  Linker
SGGG

SEQ ID NO: 92 - protein, 4 aa, Artificial Sequence
  Linker
GGGS

SEQ ID NO: 93 - protein, 5 aa, Artificial Sequence
  Linker
GGGGS

SEQ ID NO: 94 - protein, 90 aa, Artificial Sequence
  RECOMBINANT SPIKE PROTEIN
STNLVKNKCVNFNFNGLTGTGVLTESNKKFLPFQQFGRDIADTTDAVRDPQTLEILDITPCSFGGVSVITPGTNTSNQVAVLYQDVNCTE

SEQ ID NO: 95 - DNA, 3639 bp, Artificial Sequence
  RECOMBINANT SPIKE PROTEIN
atgttcgtcttcctggtgctgctgcccctggtgtccagccagtgcgtgaacctgaccactaggactcagctgcctcccgcttacaccaactcattcactcgcggtgtgtactaccctgacaaggtcttccgttcttcagtgctgcactcaactcaggacctgttcctgcccttcttctccaacgtcacctggttccacgccatccacgtgtccggcaccaacggcactaagcgcttcgacaacccagtgctgcctttcaacgacggtgtctacttcgcttcaaccgagaagtccaacatcatccgtggatggatcttcggcaccactctggacagcaagactcagtctctgctgatcgtcaacaacgccaccaacgtggtcatcaaggtctgcgaattccagttctgcaacgacccattcctgggcgtctactaccacaagaacaacaagtcatggatggagtccgaattccgcgtctactccagcgctaacaactgcactttcgagtacgtgtcccagcctttcctgatggacctggaaggaaagcagggtaacttcaagaacctgagggagttcgtgttcaagaacatcgacggatacttcaagatttacagcaagcacaccccaatcaacctggtgcgcgacctgcctcagggtttctctgctctggagccactggtggacctgcctatcggcatcaacatcacccgcttccagactctgctggctctgcaccgttcctacctgactccaggcgactcatcttctggatggactgctggagctgctgcttactacgtgggctacctgcagcctcgcaccttcctgctgaagtacaacgaaaacggaaccatcactgacgccgtcgactgcgctctggaccctctgtcagaaaccaagtgcactctgaagtccttcaccgtggagaagggcatctaccagacttcaaacttcagggtgcagcccaccgaatccatcgtcagattccctaacatcactaacctgtgccccttcggagaggtcttcaacgccacccgcttcgcttccgtgtacgcctggaacaggaagagaatctcaaactgcgtcgctgactactccgtgctgtacaactcagcctccttcagcaccttcaagtgctacggcgtgtcaccaactaagctgaacgacctgtgcttcaccaacgtctacgccgactccttcgtgatcaggggagacgaggtcagacagatcgctcctggccagactggaaagatcgccgactacaactacaagctgcccgacgacttcaccggttgcgtcatcgcttggaacagcaacaacctggactctaaagtgggtggcaactacaactacctgtaccgcctgttccgtaagtcaaacctgaagccattcgagagggacatcagcactgaaatctaccaggccggatctaccccttgcaacggtgtcgagggcttcaactgctacttccccctgcagtcctacggtttccagccaactaacggtgtgggctaccagccttacagagtggtcgtgctgagcttcgaactgctccacgctcctgctactgtgtgcggtccaaagaagtctaccaacctggtcaagaacaagtgcgtgaacttcaacttcaacggcctgaccggaactggtgtcctgaccgagagcaacaagaagttcctgcccttccagcagttcggaagggacatcgctgacaccactgacgctgtgcgcgaccctcagaccctggaaatcctggacatcactccatgctcattcggaggtgtctccgtgatcacccctggcaccaacacttctaaccaggtcgctgtgctgtaccaggacgtcaactgcaccgaggtccctgtggccatccacgctgaccagctgacccccacttggcgcgtgtactccaccggcagcaacgtgttccagactcgtgctggttgcctgatcggcgccgagcacgtgaacaacagctacgaatgcgacatccccatcggcgctggaatctgcgcctcttaccagacccagactaacagcccacgcagggctcgctctgtggcctctcagtcaatcatcgcttacaccatgtcactgggcgctgaaaactccgtggcctactctaacaactcaatcgccatccccaccaacttcactatcagcgtgaccactgagatcctgccagtcagcatgaccaagacttctgtggactgcactatgtacatctgcggagacagcaccgaatgctctaacctgctgctgcagtacggctctttctgcacccagctgaaccgtgctctgactggaatcgccgtggagcaggacaagaacactcaggaagtcttcgctcaggtgaagcaaatctacaagaccccacctatcaaggacttcggcggattcaacttctcccagatcctgcctgacccctccaagccaagcaagcgctctttcatcgaggacctgctgttcaacaaggtcactctggccgacgctggattcatcaagcagtacggagactgcctgggtgacatcgccgctcgtgacctgatctgcgctcagaagttcaacggtctgaccgtgctgcccccactgctgactgacgaaatgatcgcccagtacactagcgccctgctggctggaaccatcacttctggttggaccttcggtgctggcgccgctctgcagatccctttcgctatgcagatggcctaccgtttcaacggaatcggtgtcacccagaacgtgctgtacgagaaccagaagctgatcgctaaccagttcaactcagccatcggaaagatccaggacagcctgagctctactgcctctgctctgggcaagctgcaggacgtcgtgaaccagaacgcccaggctctgaacaccctggtcaagcagctgtcatccaacttcggtgctatcagctctgtgctgaacgacatcctgtcccgcctggacaaggtcgaggccgaagtgcagatcgaccgcctgatcactggccgtctgcagtcactgcagacctacgtgactcagcagctgatcagggccgctgaaatcagagcctccgctaacctggccgctaccaagatgagcgagtgcgtcctgggtcaatctaagcgtgtggacttctgcggcaagggataccacctgatgtcattccctcagtctgctccccacggtgtggtgttcctgcacgtcacctacgtgccagcccaggagaagaacttcaccactgcccctgctatctgccacgacggcaaggctcacttccccagggaaggtgtcttcgtgagcaacggcacccactggttcgtcactcagagaaacttctacgagccacagatcatcaccactgacaacactttcgtgtctggaaactgcgacgtggtcatcggtatcgtcaacaacaccgtgtacgaccccctgcagccagagctggactcattcaaggaggaactggacaagtacttcaagaaccacacctcccctgacgtcgacctgggcgacatctcaggaatcaacgcttccgtcgtgaacatccagaaggagatcgaccgcctgaacgaagtggccaagaacctgaacgaaagcctgatcgacctgcaggagctgggcaagtacgaacagtacatcaagtggcct

SEQ ID NO: 96 - DNA, 3822 bp, Artificial Sequence
  RECOMBINANT SPIKE PROTEIN
atgttcgtcttcctggtgctgctgcccctggtgtccagccagtgcgtgaacctgaccactaggactcagctgcctcccgcttacaccaactcattcactcgcggtgtgtactaccctgacaaggtcttccgttcttcagtgctgcactcaactcaggacctgttcctgcccttcttctccaacgtcacctggttccacgccatccacgtgtccggcaccaacggcactaagcgcttcgacaacccagtgctgcctttcaacgacggtgtctacttcgcttcaaccgagaagtccaacatcatccgtggatggatcttcggcaccactctggacagcaagactcagtctctgctgatcgtcaacaacgccaccaacgtggtcatcaaggtctgcgaattccagttctgcaacgacccattcctgggcgtctactaccacaagaacaacaagtcatggatggagtccgaattccgcgtctactccagcgctaacaactgcactttcgagtacgtgtcccagcctttcctgatggacctggaaggaaagcagggtaacttcaagaacctgagggagttcgtgttcaagaacatcgacggatacttcaagatttacagcaagcacaccccaatcaacctggtgcgcgacctgcctcagggtttctctgctctggagccactggtggacctgcctatcggcatcaacatcacccgcttccagactctgctggctctgcaccgttcctacctgactccaggcgactcatcttctggatggactgctggagctgctgcttactacgtgggctacctgcagcctcgcaccttcctgctgaagtacaacgaaaacggaaccatcactgacgccgtcgactgcgctctggaccctctgtcagaaaccaagtgcactctgaagtccttcaccgtggagaagggcatctaccagacttcaaacttcagggtgcagcccaccgaatccatcgtcagattccctaacatcactaacctgtgccccttcggagaggtcttcaacgccacccgcttcgcttccgtgtacgcctggaacaggaagagaatctcaaactgcgtcgctgactactccgtgctgtacaactcagcctccttcagcaccttcaagtgctacggcgtgtcaccaactaagctgaacgacctgtgcttcaccaacgtctacgccgactccttcgtgatcaggggagacgaggtcagacagatcgctcctggccagactggaaagatcgccgactacaactacaagctgcccgacgacttcaccggttgcgtcatcgcttggaacagcaacaacctggactctaaagtgggtggcaactacaactacctgtaccgcctgttccgtaagtcaaacctgaagccattcgagagggacatcagcactgaaatctaccaggccggatctaccccttgcaacggtgtcgagggcttcaactgctacttccccctgcagtcctacggtttccagccaactaacggtgtgggctaccagccttacagagtggtcgtgctgagcttcgaactgctccacgctcctgctactgtgtgcggtccaaagaagtctaccaacctggtcaagaacaagtgcgtgaacttcaacttcaacggcctgaccggaactggtgtcctgaccgagagcaacaagaagttcctgcccttccagcagttcggaagggacatcgctgacaccactgacgctgtgcgcgaccctcagaccctggaaatcctggacatcactccatgctcattcggaggtgtctccgtgatcacccctggcaccaacacttctaaccaggtcgctgtgctgtaccaggacgtcaactgcaccgaggtccctgtggccatccacgctgaccagctgacccccacttggcgcgtgtactccaccggcagcaacgtgttccagactcgtgctggttgcctgatcggcgccgagcacgtgaacaacagctacgaatgcgacatccccatcggcgctggaatctgcgcctcttaccagacccagactaacagcccacagcaggctcagtctgtggcctctcagtcaatcatcgcttacaccatgtcactgggcgctgaaaactccgtggcctactctaacaactcaatcgccatccccaccaacttcactatcagcgtgaccactgagatcctgccagtcagcatgaccaagacttctgtggactgcactatgtacatctgcggagacagcaccgaatgctctaacctgctgctgcagtacggctctttctgcacccagctgaaccgtgctctgactggaatcgccgtggagcaggacaagaacactcaggaagtcttcgctcaggtgaagcaaatctacaagaccccacctatcaaggacttcggcggattcaacttctcccagatcctgcctgacccctccaagccaagcaagcgctctttcatcgaggacctgctgttcaacaaggtcactctggccgacgctggattcatcaagcagtacggagactgcctgggtgacatcgccgctcgtgacctgatctgcgctcagaagttcaacggtctgaccgtgctgcccccactgctgactgacgaaatgatcgcccagtacactagcgccctgctggctggaaccatcacttctggttggaccttcggtgctggcgccgctctgcagatccctttcgctatgcagatggcctaccgtttcaacggaatcggtgtcacccagaacgtgctgtacgagaaccagaagctgatcgctaaccagttcaactcagccatcggaaagatccaggacagcctgagctctactgcctctgctctgggcaagctgcaggacgtcgtgaaccagaacgcccaggctctgaacaccctggtcaagcagctgtcatccaacttcggtgctatcagctctgtgctgaacgacatcctgtcccgcctggaccctcccgaggccgaagtgcagatcgaccgcctgatcactggccgtctgcagtcactgcagacctacgtgactcagcagctgatcagggccgctgaaatcagagcctccgctaacctggccgctaccaagatgagcgagtgcgtcctgggtcaatctaagcgtgtggacttctgcggcaagggataccacctgatgtcattccctcagtctgctccccacggtgtggtgttcctgcacgtcacctacgtgccagcccaggagaagaacttcaccactgcccctgctatctgccacgacggcaaggctcacttccccagggaaggtgtcttcgtgagcaacggcacccactggttcgtcactcagagaaacttctacgagccacagatcatcaccactgacaacactttcgtgtctggaaactgcgacgtggtcatcggtatcgtcaacaacaccgtgtacgaccccctgcagccagagctggactcattcaaggaggaactggacaagtacttcaagaaccacacctcccctgacgtcgacctgggcgacatctcaggaatcaacgcttccgtcgtgaacatccagaaggagatcgaccgcctgaacgaagtggccaagaacctgaacgaaagcctgatcgacctgcaggagctgggcaagtacgaacagtacatcaagtggccttggtacatctggctgggtttcatcgctggcctcatcgctatcgtgatggtgaccatcatgctgtgctgcatgacttcatgctgctcctgcctgaagggctgctgcagctgcggatcttgctgcaagttcgacgaggacgactctgaacccgtcctgaagggcgtgaagctgcactacacctaa

SEQ ID NO: 97 - protein, 4 aa, Artificial Sequence
  Recombinant Furin Cleavage Site
GSAS

SEQ ID NO: 98 - protein, 8 aa, Artificial Sequence
  HRV3C Cleavage Site
LEVLFQGP

SEQ ID NO: 99 - protein, 8 aa, Artificial Sequence
  Strep-tag
WSHPQFEK

SEQ ID NO: 100 - protein, 6 aa, Artificial Sequence
  6X-His Tag
HHHHHH

SEQ ID NO: 101 - protein, 10 aa, Artificial Sequence
  His-Tag
  SITE (6)..(6): May be present or absent
  SITE (7)..(7): May be present or absent
  SITE (8)..(8): May be present or absent
  SITE (9)..(9): May be present or absent
  SITE (10)..(10): May be present or absent
HHHHHHHHHH

SEQ ID NO: 102 - protein, 8 aa, Artificial Sequence
  8X-His Tag
HHHHHHHH

SEQ ID NO: 103 - protein, 30 aa, Artificial Sequence
  FOLDON
GYIPEAPRDGQAYVRKDGEWVLLSTFLSPA

SEQ ID NO: 104 - protein, 10 aa, Artificial Sequence
  RECOMBINANT SPIKE PROTEIN
EDLLFNKVTL

SEQ ID NO: 105 - protein, 1263 aa, Artificial Sequence
  RECOMBINANT SPIKE PROTEIN
MFVFLVLLPLVSSQCVNLTTRTQLPPAYTNSFTRGVYYPDKVFRSSVLHSTQDLFLPFFSNVTWFHAIHVSGTNGTKRFDNPVLPFNDGVYFASTEKSNIIRGWIFGTTLDSKTQSLLIVNNATNVVIKVCEFQFCNDPFLGVYYHKNNKSWMESEFRVYSSANNCTFEYVSQPFLMDLEGKQGNFKNLREFVFKNIDGYFKIYSKHTPINLVRDLPQGFSALEPLVDLPIGINITRFQTLLALHRSYLTPGDSSSGWTAGAAAYYVGYLQPRTFLLKYNENGTITDAVDCALDPLSETKCTLKSFTVEKGIYQTSNFRVQPTESIVRFPNITNLCPFGEVFNATRFASVYAWNRKRISNCVADYSVLYNSASFSTFKCYGVSPTKLNDLCFTNVYADSFVIRGDEVRQIAPGQTGKIADYNYKLPDDFTGCVIAWNSNNLDSKVGGNYNYLYRLFRKSNLKPFERDISTEIYQAGSTPCNGVEGFNCYFPLQSYGFQPTNGVGYQPYRVVVLSFELLHAPATVCGPKKSTNLVKNKCVNFNFNGLTGTGVLTESNKKFLPFQQFGRDIADTTDAVRDPQTLEILDITPCSFGGVSVITPGTNTSNQVAVLYQDVNCTEVPVAIHADQLTPTWRVYSTGSNVFQTRAGCLIGAEHVNNSYECDIPIGAGICASYQTQTNSPQQAQSVASQSIIAYTMSLGAENSVAYSNNSIAIPTNFTISVTTEILPVSMTKTSVDCTMYICGDSTECSNLLLQYGSFCTQLNRALTGIAVEQDKNTQEVFAQVKQIYKTPPIKDFGGFNFSQILPDPSKPSKRSFIADAGFIKQYGDCLGDIAARDLICAQKFNGLTVLPPLLTDEMIAQYTSALLAGTITSGWTFGAGAALQIPFAMQMAYRFNGIGVTQNVLYENQKLIANQFNSAIGKIQDSLSSTASALGKLQDVVNQNAQALNTLVKQLSSNFGAISSVLNDILSRLDPPEAEVQIDRLITGRLQSLQTYVTQQLIRAAEIRASANLAATKMSECVLGQSKRVDFCGKGYHLMSFPQSAPHGVVFLHVTYVPAQEKNFTTAPAICHDGKAHFPREGVFVSNGTHWFVTQRNFYEPQIITTDNTFVSGNCDVVIGIVNNTVYDPLQPELDSFKEELDKYFKNHTSPDVDLGDISGINASVVNIQKEIDRLNEVAKNLNESLIDLQELGKYEQYIKWPWYIWLGFIAGLIAIVMVTIMLCCMTSCCSCLKGCCSCGSCCKFDEDDSEPVLKGVKLHYT

SEQ ID NO: 106 - protein, 1250 aa, Artificial Sequence
  RECOMBINANT SPIKE PROTEIN
QCVNLTTRTQLPPAYTNSFTRGVYYPDKVFRSSVLHSTQDLFLPFFSNVTWFHAIHVSGTNGTKRFDNPVLPFNDGVYFASTEKSNIIRGWIFGTTLDSKTQSLLIVNNATNVVIKVCEFQFCNDPFLGVYYHKNNKSWMESEFRVYSSANNCTFEYVSQPFLMDLEGKQGNFKNLREFVFKNIDGYFKIYSKHTPINLVRDLPQGFSALEPLVDLPIGINITRFQTLLALHRSYLTPGDSSSGWTAGAAAYYVGYLQPRTFLLKYNENGTITDAVDCALDPLSETKCTLKSFTVEKGIYQTSNFRVQPTESIVRFPNITNLCPFGEVFNATRFASVYAWNRKRISNCVADYSVLYNSASFSTFKCYGVSPTKLNDLCFTNVYADSFVIRGDEVRQIAPGQTGKIADYNYKLPDDFTGCVIAWNSNNLDSKVGGNYNYLYRLFRKSNLKPFERDISTEIYQAGSTPCNGVEGFNCYFPLQSYGFQPTNGVGYQPYRVVVLSFELLHAPATVCGPKKSTNLVKNKCVNFNFNGLTGTGVLTESNKKFLPFQQFGRDIADTTDAVRDPQTLEILDITPCSFGGVSVITPGTNTSNQVAVLYQDVNCTEVPVAIHADQLTPTWRVYSTGSNVFQTRAGCLIGAEHVNNSYECDIPIGAGICASYQTQTNSPQQAQSVASQSIIAYTMSLGAENSVAYSNNSIAIPTNFTISVTTEILPVSMTKTSVDCTMYICGDSTECSNLLLQYGSFCTQLNRALTGIAVEQDKNTQEVFAQVKQIYKTPPIKDFGGFNFSQILPDPSKPSKRSFIADAGFIKQYGDCLGDIAARDLICAQKFNGLTVLPPLLTDEMIAQYTSALLAGTITSGWTFGAGAALQIPFAMQMAYRFNGIGVTQNVLYENQKLIANQFNSAIGKIQDSLSSTASALGKLQDVVNQNAQALNTLVKQLSSNFGAISSVLNDILSRLDPPEAEVQIDRLITGRLQSLQTYVTQQLIRAAEIRASANLAATKMSECVLGQSKRVDFCGKGYHLMSFPQSAPHGVVFLHVTYVPAQEKNFTTAPAICHDGKAHFPREGVFVSNGTHWFVTQRNFYEPQIITTDNTFVSGNCDVVIGIVNNTVYDPLQPELDSFKEELDKYFKNHTSPDVDLGDISGINASVVNIQKEIDRLNEVAKNLNESLIDLQELGKYEQYIKWPWYIWLGFIAGLIAIVMVTIMLCCMTSCCSCLKGCCSCGSCCKFDEDDSEPVLKGVKLHYT

SEQ ID NO: 107 - protein, 1263 aa, Artificial Sequence
  RECOMBINANT SPIKE PROTEIN
MFVFLVLLPLVSSQCVNLTTRTQLPPAYTNSFTRGVYYPDKVFRSSVLHSTQDLFLPFFSNVTWFHAIHVSGTNGTKRFDNPVLPFNDGVYFASTEKSNIIRGWIFGTTLDSKTQSLLIVNNATNVVIKVCEFQFCNDPFLGVYYHKNNKSWMESEFRVYSSANNCTFEYVSQPFLMDLEGKQGNFKNLREFVFKNIDGYFKIYSKHTPINLVRDLPQGFSALEPLVDLPIGINITRFQTLLALHRSYLTPGDSSSGWTAGAAAYYVGYLQPRTFLLKYNENGTITDAVDCALDPLSETKCTLKSFTVEKGIYQTSNFRVQPTESIVRFPNITNLCPFGEVFNATRFASVYAWNRKRISNCVADYSVLYNSASFSTFKCYGVSPTKLNDLCFTNVYADSFVIRGDEVRQIAPGQTGKIADYNYKLPDDFTGCVIAWNSNNLDSKVGGNYNYLYRLFRKSNLKPFERDISTEIYQAGSTPCNGVEGFNCYFPLQSYGFQPTNGVGYQPYRVVVLSFELLHAPATVCGPKKSTNLVKNKCVNFNFNGLTGTGVLTESNKKFLPFQQFGRDIADTTDAVRDPQTLEILDITPCSFGGVSVITPGTNTSNQVAVLYQDVNCTEVPVAIHADQLTPTWRVYSTGSNVFQTRAGCLIGAEHVNNSYECDIPIGAGICASYQTQTNSPRRARSVASQSIIAYTMSLGAENSVAYSNNSIAIPTNFTISVTTEILPVSMTKTSVDCTMYICGDSTECSNLLLQYGSFCTQLNRALTGIAVEQDKNTQEVFAQVKQIYKTPPIKDFGGFNFSQILPDPSKPSKRSFIADAGFIKQYGDCLGDIAARDLICAQKFNGLTVLPPLLTDEMIAQYTSALLAGTITSGWTFGAGAALQIPFAMQMAYRFNGIGVTQNVLYENQKLIANQFNSAIGKIQDSLSSTASALGKLQDVVNQNAQALNTLVKQLSSNFGAISSVLNDILSRLDKVEAEVQIDRLITGRLQSLQTYVTQQLIRAAEIRASANLAATKMSECVLGQSKRVDFCGKGYHLMSFPQSAPHGVVFLHVTYVPAQEKNFTTAPAICHDGKAHFPREGVFVSNGTHWFVTQRNFYEPQIITTDNTFVSGNCDVVIGIVNNTVYDPLQPELDSFKEELDKYFKNHTSPDVDLGDISGINASVVNIQKEIDRLNEVAKNLNESLIDLQELGKYEQYIKWPWYIWLGFIAGLIAIVMVTIMLCCMTSCCSCLKGCCSCGSCCKFDEDDSEPVLKGVKLHYT

SEQ ID NO: 108 - protein, 1250 aa, Artificial Sequence
  RECOMBINANT SPIKE PROTEIN
QCVNLTTRTQLPPAYTNSFTRGVYYPDKVFRSSVLHSTQDLFLPFFSNVTWFHAIHVSGTNGTKRFDNPVLPFNDGVYFASTEKSNIIRGWIFGTTLDSKTQSLLIVNNATNVVIKVCEFQFCNDPFLGVYYHKNNKSWMESEFRVYSSANNCTFEYVSQPFLMDLEGKQGNFKNLREFVFKNIDGYFKIYSKHTPINLVRDLPQGFSALEPLVDLPIGINITRFQTLLALHRSYLTPGDSSSGWTAGAAAYYVGYLQPRTFLLKYNENGTITDAVDCALDPLSETKCTLKSFTVEKGIYQTSNFRVQPTESIVRFPNITNLCPFGEVFNATRFASVYAWNRKRISNCVADYSVLYNSASFSTFKCYGVSPTKLNDLCFTNVYADSFVIRGDEVRQIAPGQTGKIADYNYKLPDDFTGCVIAWNSNNLDSKVGGNYNYLYRLFRKSNLKPFERDISTEIYQAGSTPCNGVEGFNCYFPLQSYGFQPTNGVGYQPYRVVVLSFELLHAPATVCGPKKSTNLVKNKCVNFNFNGLTGTGVLTESNKKFLPFQQFGRDIADTTDAVRDPQTLEILDITPCSFGGVSVITPGTNTSNQVAVLYQDVNCTEVPVAIHADQLTPTWRVYSTGSNVFQTRAGCLIGAEHVNNSYECDIPIGAGICASYQTQTNSPRRARSVASQSIIAYTMSLGAENSVAYSNNSIAIPTNFTISVTTEILPVSMTKTSVDCTMYICGDSTECSNLLLQYGSFCTQLNRALTGIAVEQDKNTQEVFAQVKQIYKTPPIKDFGGFNFSQILPDPSKPSKRSFIADAGFIKQYGDCLGDIAARDLICAQKFNGLTVLPPLLTDEMIAQYTSALLAGTITSGWTFGAGAALQIPFAMQMAYRFNGIGVTQNVLYENQKLIANQFNSAIGKIQDSLSSTASALGKLQDVVNQNAQALNTLVKQLSSNFGAISSVLNDILSRLDKVEAEVQIDRLITGRLQSLQTYVTQQLIRAAEIRASANLAATKMSECVLGQSKRVDFCGKGYHLMSFPQSAPHGVVFLHVTYVPAQEKNFTTAPAICHDGKAHFPREGVFVSNGTHWFVTQRNFYEPQIITTDNTFVSGNCDVVIGIVNNTVYDPLQPELDSFKEELDKYFKNHTSPDVDLGDISGINASVVNIQKEIDRLNEVAKNLNESLIDLQELGKYEQYIKWPWYIWLGFIAGLIAIVMVTIMLCCMTSCCSCLKGCCSCGSCCKFDEDDSEPVLKGVKLHYT

SEQ ID NO: 109 - protein, 1273 aa, Artificial Sequence
  Recombinant CoV S polypeptide
MFVFLVLLPLVSSQCVNLTTRTQLPPAYTNSFTRGVYYPDKVFRSSVLHSTQDLFLPFFSNVTWFHAIHVSGTNGTKRFDNPVLPFNDGVYFASTEKSNIIRGWIFGTTLDSKTQSLLIVNNATNVVIKVCEFQFCNDPFLGVYYHKNNKSWMESEFRVYSSANNCTFEYVSQPFLMDLEGKQGNFKNLREFVFKNIDGYFKIYSKHTPINLVRDLPQGFSALEPLVDLPIGINITRFQTLLALHRSYLTPGDSSSGWTAGAAAYYVGYLQPRTFLLKYNENGTITDAVDCALDPLSETKCTLKSFTVEKGIYQTSNFRVQPTESIVRFPNITNLCPFGEVFNATRFASVYAWNRKRISNCVADYSVLYNSASFSTFKCYGVSPTKLNDLCFTNVYADSFVIRGDEVRQIAPGQTGKIADYNYKLPDDFTGCVIAWNSNNLDSKVGGNYNYLYRLFRKSNLKPFERDISTEIYQAGSTPCNGVEGFNCYFPLQSYGFQPTNGVGYQPYRVVVLSFELLHAPATVCGPKKSTNLVKNKCVNFNFNGLTGTGVLTESNKKFLPFQQFGRDIADTTDAVRDPQTLEILDITPCSFGGVSVITPGTNTSNQVAVLYQDVNCTEVPVAIHADQLTPTWRVYSTGSNVFQTRAGCLIGAEHVNNSYECDIPIGAGICASYQTQTNSPGSASSVASQSIIAYTMSLGAENSVAYSNNSIAIPTNFTISVTTEILPVSMTKTSVDCTMYICGDSTECSNLLLQYGSFCTQLNRALTGIAVEQDKNTQEVFAQVKQIYKTPPIKDFGGFNFSQILPDPSKPSKRSFIEDLLFNKVTLADAGFIKQYGDCLGDIAARDLICAQKFNGLTVLPPLLTDEMIAQYTSALLAGTITSGWTFGAGAALQIPFAMQMAYRFNGIGVTQNVLYENQKLIANQFNSAIGKIQDSLSSTASALGKLQDVVNQNAQALNTLVKQLSSNFGAISSVLNDILSRLDPPEAEVQIDRLITGRLQSLQTYVTQQLIRAAEIRASANLAATKMSECVLGQSKRVDFCGKGYHLMSFPQSAPHGVVFLHVTYVPAQEKNFTTAPAICHDGKAHFPREGVFVSNGTHWFVTQRNFYEPQIITTDNTFVSGNCDVVIGIVNNTVYDPLQPELDSFKEELDKYFKNHTSPDVDLGDISGINASVVNIQKEIDRLNEVAKNLNESLIDLQELGKYEQYIKWPWYIWLGFIAGLIAIVMVTIMLCCMTSCCSCLKGCCSCGSCCKFDEDDSEPVLKGVKLHYT

SEQ ID NO: 110 - protein, 1260 aa, Artificial Sequence
  Recombinant CoV S polypeptide
QCVNLTTRTQLPPAYTNSFTRGVYYPDKVFRSSVLHSTQDLFLPFFSNVTWFHAIHVSGTNGTKRFDNPVLPFNDGVYFASTEKSNIIRGWIFGTTLDSKTQSLLIVNNATNVVIKVCEFQFCNDPFLGVYYHKNNKSWMESEFRVYSSANNCTFEYVSQPFLMDLEGKQGNFKNLREFVFKNIDGYFKIYSKHTPINLVRDLPQGFSALEPLVDLPIGINITRFQTLLALHRSYLTPGDSSSGWTAGAAAYYVGYLQPRTFLLKYNENGTITDAVDCALDPLSETKCTLKSFTVEKGIYQTSNFRVQPTESIVRFPNITNLCPFGEVFNATRFASVYAWNRKRISNCVADYSVLYNSASFSTFKCYGVSPTKLNDLCFTNVYADSFVIRGDEVRQIAPGQTGKIADYNYKLPDDFTGCVIAWNSNNLDSKVGGNYNYLYRLFRKSNLKPFERDISTEIYQAGSTPCNGVEGFNCYFPLQSYGFQPTNGVGYQPYRVVVLSFELLHAPATVCGPKKSTNLVKNKCVNFNFNGLTGTGVLTESNKKFLPFQQFGRDIADTTDAVRDPQTLEILDITPCSFGGVSVITPGTNTSNQVAVLYQDVNCTEVPVAIHADQLTPTWRVYSTGSNVFQTRAGCLIGAEHVNNSYECDIPIGAGICASYQTQTNSPGSASSVASQSIIAYTMSLGAENSVAYSNNSIAIPTNFTISVTTEILPVSMTKTSVDCTMYICGDSTECSNLLLQYGSFCTQLNRALTGIAVEQDKNTQEVFAQVKQIYKTPPIKDFGGFNFSQILPDPSKPSKRSFIEDLLFNKVTLADAGFIKQYGDCLGDIAARDLICAQKFNGLTVLPPLLTDEMIAQYTSALLAGTITSGWTFGAGAALQIPFAMQMAYRFNGIGVTQNVLYENQKLIANQFNSAIGKIQDSLSSTASALGKLQDVVNQNAQALNTLVKQLSSNFGAISSVLNDILSRLDPPEAEVQIDRLITGRLQSLQTYVTQQLIRAAEIRASANLAATKMSECVLGQSKRVDFCGKGYHLMSFPQSAPHGVVFLHVTYVPAQEKNFTTAPAICHDGKAHFPREGVFVSNGTHWFVTQRNFYEPQIITTDNTFVSGNCDVVIGIVNNTVYDPLQPELDSFKEELDKYFKNHTSPDVDLGDISGINASVVNIQKEIDRLNEVAKNLNESLIDLQELGKYEQYIKWPWYIWLGFIAGLIAIVMVTIMLCCMTSCCSCLKGCCSCGSCCKFDEDDSEPVLKGVKLHYT

SEQ ID NO: 111 - protein, 4 aa, Artificial Sequence
  Recombinant Furin Cleavage Site
GSGA

SEQ ID NO: 112 - protein, 1260 aa, Artificial Sequence
  Recombinant SARS-CoV-2 spike protein
QCVNLTTRTQLPPAYTNSFTRGVYYPDKVFRSSVLHSTQDLFLPFFSNVTWFHAIHVSGTNGTKRFDNPVLPFNDGVYFASTEKSNIIRGWIFGTTLDSKTQSLLIVNNATNVVIKVCEFQFCNDPFLGVYYHKNNKSWMESEFRVYSSANNCTFEYVSQPFLMDLEGKQGNFKNLREFVFKNIDGYFKIYSKHTPINLVRDLPQGFSALEPLVDLPIGINITRFQTLLALHRSYLTPGDSSSGWTAGAAAYYVGYLQPRTFLLKYNENGTITDAVDCALDPLSETKCTLKSFTVEKGIYQTSNFRVQPTESIVRFPNITNLCPFGEVFNATRFASVYAWNRKRISNCVADYSVLYNSASFSTFKCYGVSPTKLNDLCFTNVYADSFVIRGDEVRQIAPGQTGKIADYNYKLPDDFTGCVIAWNSNNLDSKVGGNYNYLYRLFRKSNLKPFERDISTEIYQAGSTPCNGVEGFNCYFPLQSYGFQPTYGVGYQPYRVVVLSFELLHAPATVCGPKKSTNLVKNKCVNFNFNGLTGTGVLTESNKKFLPFQQFGRDIADTTDAVRDPQTLEILDITPCSFGGVSVITPGTNTSNQVAVLYQDVNCTEVPVAIHADQLTPTWRVYSTGSNVFQTRAGCLIGAEHVNNSYECDIPIGAGICASYQTQTNSPQQAQSVASQSIIAYTMSLGAENSVAYSNNSIAIPTNFTISVTTEILPVSMTKTSVDCTMYICGDSTECSNLLLQYGSFCTQLNRALTGIAVEQDKNTQEVFAQVKQIYKTPPIKDFGGFNFSQILPDPSKPSKRSFIEDLLFNKVTLADAGFIKQYGDCLGDIAARDLICAQKFNGLTVLPPLLTDEMIAQYTSALLAGTITSGWTFGAGAALQIPFAMQMAYRFNGIGVTQNVLYENQKLIANQFNSAIGKIQDSLSSTASALGKLQDVVNQNAQALNTLVKQLSSNFGAISSVLNDILSRLDPPEAEVQIDRLITGRLQSLQTYVTQQLIRAAEIRASANLAATKMSECVLGQSKRVDFCGKGYHLMSFPQSAPHGVVFLHVTYVPAQEKNFTTAPAICHDGKAHFPREGVFVSNGTHWFVTQRNFYEPQIITTDNTFVSGNCDVVIGIVNNTVYDPLQPELDSFKEELDKYFKNHTSPDVDLGDISGINASVVNIQKEIDRLNEVAKNLNESLIDLQELGKYEQYIKWPWYIWLGFIAGLIAIVMVTIMLCCMTSCCSCLKGCCSCGSCCKFDEDDSEPVLKGVKLHYT

SEQ ID NO: 113 - protein, 1260 aa, Artificial Sequence
  Recombinant SARS-CoV-2 spike protein
QCVNLTTRTQLPPAYTNSFTRGVYYPDKVFRSSVLHSTQDLFLPFFSNVTWFHAIHVSGTNGTKRFDNPVLPFNDGVYFASTEKSNIIRGWIFGTTLDSKTQSLLIVNNATNVVIKVCEFQFCNDPFLGVYYHKNNKSWMESEFRVYSSANNCTFEYVSQPFLMDLEGKQGNFKNLREFVFKNIDGYFKIYSKHTPINLVRDLPQGFSALEPLVDLPIGINITRFQTLLALHRSYLTPGDSSSGWTAGAAAYYVGYLQPRTFLLKYNENGTITDAVDCALDPLSETKCTLKSFTVEKGIYQTSNFRVQPTESIVRFPNITNLCPFGEVFNATRFASVYAWNRKRISNCVADYSVLYNSASFSTFKCYGVSPTKLNDLCFTNVYADSFVIRGDEVRQIAPGQTGKIADYNYKLPDDFTGCVIAWNSNNLDSKVGGNYNYLYRLFRKSNLKPFERDISTEIYQAGSTPCNGVEGFNCYFPLQSYGFQPTYGVGYQPYRVVVLSFELLHAPATVCGPKKSTNLVKNKCVNFNFNGLTGTGVLTESNKKFLPFQQFGRDIADTTDAVRDPQTLEILDITPCSFGGVSVITPGTNTSNQVAVLYQGVNCTEVPVAIHADQLTPTWRVYSTGSNVFQTRAGCLIGAEHVNNSYECDIPIGAGICASYQTQTNSPQQAQSVASQSIIAYTMSLGAENSVAYSNNSIAIPTNFTISVTTEILPVSMTKTSVDCTMYICGDSTECSNLLLQYGSFCTQLNRALTGIAVEQDKNTQEVFAQVKQIYKTPPIKDFGGFNFSQILPDPSKPSKRSFIEDLLFNKVTLADAGFIKQYGDCLGDIAARDLICAQKFNGLTVLPPLLTDEMIAQYTSALLAGTITSGWTFGAGAALQIPFAMQMAYRFNGIGVTQNVLYENQKLIANQFNSAIGKIQDSLSSTASALGKLQDVVNQNAQALNTLVKQLSSNFGAISSVLNDILSRLDPPEAEVQIDRLITGRLQSLQTYVTQQLIRAAEIRASANLAATKMSECVLGQSKRVDFCGKGYHLMSFPQSAPHGVVFLHVTYVPAQEKNFTTAPAICHDGKAHFPREGVFVSNGTHWFVTQRNFYEPQIITTDNTFVSGNCDVVIGIVNNTVYDPLQPELDSFKEELDKYFKNHTSPDVDLGDISGINASVVNIQKEIDRLNEVAKNLNESLIDLQELGKYEQYIKWPWYIWLGFIAGLIAIVMVTIMLCCMTSCCSCLKGCCSCGSCCKFDEDDSEPVLKGVKLHYT

SEQ ID NO: 114 - protein, 1257 aa, Artificial Sequence
  Recombinant SARS-CoV-2 spike protein
QCVNLTTRTQLPPAYTNSFTRGVYYPDKVFRSSVLHSTQDLFLPFFSNVTWFHAISGTNGTKRFDNPVLPFNDGVYFASTEKSNIIRGWIFGTTLDSKTQSLLIVNNATNVVIKVCEFQFCNDPFLGVYHKNNKSWMESEFRVYSSANNCTFEYVSQPFLMDLEGKQGNFKNLREFVFKNIDGYFKIYSKHTPINLVRDLPQGFSALEPLVDLPIGINITRFQTLLALHRSYLTPGDSSSGWTAGAAAYYVGYLQPRTFLLKYNENGTITDAVDCALDPLSETKCTLKSFTVEKGIYQTSNFRVQPTESIVRFPNITNLCPFGEVFNATRFASVYAWNRKRISNCVADYSVLYNSASFSTFKCYGVSPTKLNDLCFTNVYADSFVIRGDEVRQIAPGQTGKIADYNYKLPDDFTGCVIAWNSNNLDSKVGGNYNYLYRLFRKSNLKPFERDISTEIYQAGSTPCNGVEGFNCYFPLQSYGFQPTYGVGYQPYRVVVLSFELLHAPATVCGPKKSTNLVKNKCVNFNFNGLTGTGVLTESNKKFLPFQQFGRDIDDTTDAVRDPQTLEILDITPCSFGGVSVITPGTNTSNQVAVLYQGVNCTEVPVAIHADQLTPTWRVYSTGSNVFQTRAGCLIGAEHVNNSYECDIPIGAGICASYQTQTNSHQQAQSVASQSIIAYTMSLGAENSVAYSNNSIAIPINFTISVTTEILPVSMTKTSVDCTMYICGDSTECSNLLLQYGSFCTQLNRALTGIAVEQDKNTQEVFAQVKQIYKTPPIKDFGGFNFSQILPDPSKPSKRSFIEDLLFNKVTLADAGFIKQYGDCLGDIAARDLICAQKFNGLTVLPPLLTDEMIAQYTSALLAGTITSGWTFGAGAALQIPFAMQMAYRFNGIGVTQNVLYENQKLIANQFNSAIGKIQDSLSSTASALGKLQDVVNQNAQALNTLVKQLSSNFGAISSVLNDILARLDPPEAEVQIDRLITGRLQSLQTYVTQQLIRAAEIRASANLAATKMSECVLGQSKRVDFCGKGYHLMSFPQSAPHGVVFLHVTYVPAQEKNFTTAPAICHDGKAHFPREGVFVSNGTHWFVTQRNFYEPQIITTHNTFVSGNCDVVIGIVNNTVYDPLQPELDSFKEELDKYFKNHTSPDVDLGDISGINASVVNIQKEIDRLNEVAKNLNESLIDLQELGKYEQYIKWPWYIWLGFIAGLIAIVMVTIMLCCMTSCCSCLKGCCSCGSCCKFDEDDSEPVLKGVKLHYT

SEQ ID NO: 115 - protein, 1260 aa, Artificial Sequence
  Recombinant SARS-CoV-2 spike protein
QCVNLTTRTQLPPAYTNSFTRGVYYPDKVFRSSVLHSTQDLFLPFFSNVTWFHAIHVSGTNGTKRFANPVLPFNDGVYFASTEKSNIIRGWIFGTTLDSKTQSLLIVNNATNVVIKVCEFQFCNDPFLGVYYHKNNKSWMESEFRVYSSANNCTFEYVSQPFLMDLEGKQGNFKNLREFVFKNIDGYFKIYSKHTPINLVRGLPQGFSALEPLVDLPIGINITRFQTLHALHRSYLTPGDSSSGWTAGAAAYYVGYLQPRTFLLKYNENGTITDAVDCALDPLSETKCTLKSFTVEKGIYQTSNFRVQPTESIVRFPNITNLCPFGEVFNATRFASVYAWNRKRISNCVADYSVLYNSASFSTFKCYGVSPTKLNDLCFTNVYADSFVIRGDEVRQIAPGQTGNIADYNYKLPDDFTGCVIAWNSNNLDSKVGGNYNYLYRLFRKSNLKPFERDISTEIYQAGSTPCNGVKGFNCYFPLQSYGFQPTYGVGYQPYRVVVLSFELLHAPATVCGPKKSTNLVKNKCVNFNFNGLTGTGVLTESNKKFLPFQQFGRDIADTTDAVRDPQTLEILDITPCSFGGVSVITPGTNTSNQVAVLYQGVNCTEVPVAIHADQLTPTWRVYSTGSNVFQTRAGCLIGAEHVNNSYECDIPIGAGICASYQTQTNSPQQAQSVASQSIIAYTMSLGVENSVAYSNNSIAIPTNFTISVTTEILPVSMTKTSVDCTMYICGDSTECSNLLLQYGSFCTQLNRALTGIAVEQDKNTQEVFAQVKQIYKTPPIKDFGGFNFSQILPDPSKPSKRSFIEDLLFNKVTLADAGFIKQYGDCLGDIAARDLICAQKFNGLTVLPPLLTDEMIAQYTSALLAGTITSGWTFGAGAALQIPFAMQMAYRFNGIGVTQNVLYENQKLIANQFNSAIGKIQDSLSSTASALGKLQDVVNQNAQALNTLVKQLSSNFGAISSVLNDILSRLDPPEAEVQIDRLITGRLQSLQTYVTQQLIRAAEIRASANLAATKMSECVLGQSKRVDFCGKGYHLMSFPQSAPHGVVFLHVTYVPAQEKNFTTAPAICHDGKAHFPREGVFVSNGTHWFVTQRNFYEPQIITTDNTFVSGNCDVVIGIVNNTVYDPLQPELDSFKEELDKYFKNHTSPDVDLGDISGINASVVNIQKEIDRLNEVAKNLNESLIDLQELGKYEQYIKWPWYIWLGFIAGLIAIVMVTIMLCCMTSCCSCLKGCCSCGSCCKFDEDDSEPVLKGVKLHYT

SEQ ID NO: 116 - protein, 196 aa, Betacoronavirus severe acute respiratory syndrome coronavirus 2
LCPFGEVFNATRFASVYAWNRKRISNCVADYSVLYNSASFSTFKCYGVSPTKLNDLCFTNVYADSFVIRGDEVRQIAPGQTGKIADYNYKLPDDFTGCVIAWNSNNLDSKVGGNYNYLYRLFRKSNLKPFERDISTEIYQAGSTPCNGVEGFNCYFPLQSYGFQPTNGVGYQPYRVVVLSFELLHAPATVCGPKKS

SEQ ID NO: 117 - protein, 13 aa, Artificial Sequence
  signal peptide
MFVFLVLLPLVSI

SEQ ID NO: 118 - protein, 292 aa, Betacoronavirus severe acute respiratory syndrome coronavirus 2
QCVNLTTRTQLPPAYTNSFTRGVYYPDKVFRSSVLHSTQDLFLPFFSNVTWFHAIHVSGTNGTKRFDNPVLPFNDGVYFASTEKSNIIRGWIFGTTLDSKTQSLLIVNNATNVVIKVCEFQFCNDPFLGVYYHKNNKSWMESEFRVYSSANNCTFEYVSQPFLMDLEGKQGNFKNLREFVFKNIDGYFKIYSKHTPINLVRDLPQGFSALEPLVDLPIGINITRFQTLLALHRSYLTPGDSSSGWTAGAAAYYVGYLQPRTFLLKYNENGTITDAVDCALDPLSETKCTLKS

SEQ ID NO: 119 - protein, 83 aa, Betacoronavirus severe acute respiratory syndrome coronavirus 2
MAYRFNGIGVTQNVLYENQKLIANQFNSAIGKIQDSLSSTASALGKLQDVVNQNAQALNTLVKQLSSNFGAISSVLNDILSRL

SEQ ID NO: 120 - protein, 588 aa, Betacoronavirus severe acute respiratory syndrome coronavirus 2
SVASQSIIAYTMSLGAENSVAYSNNSIAIPTNFTISVTTEILPVSMTKTSVDCTMYICGDSTECSNLLLQYGSFCTQLNRALTGIAVEQDKNTQEVFAQVKQIYKTPPIKDFGGFNFSQILPDPSKPSKRSFIEDLLFNKVTLADAGFIKQYGDCLGDIAARDLICAQKFNGLTVLPPLLTDEMIAQYTSALLAGTITSGWTFGAGAALQIPFAMQMAYRFNGIGVTQNVLYENQKLIANQFNSAIGKIQDSLSSTASALGKLQDVVNQNAQALNTLVKQLSSNFGAISSVLNDILSRLDKVEAEVQIDRLITGRLQSLQTYVTQQLIRAAEIRASANLAATKMSECVLGQSKRVDFCGKGYHLMSFPQSAPHGVVFLHVTYVPAQEKNFTTAPAICHDGKAHFPREGVFVSNGTHWFVTQRNFYEPQIITTDNTFVSGNCDVVIGIVNNTVYDPLQPELDSFKEELDKYFKNHTSPDVDLGDISGINASVVNIQKEIDRLNEVAKNLNESLIDLQELGKYEQYIKWPWYIWLGFIAGLIAIVMVTIMLCCMTSCCSCLKGCCSCGSCCKFDEDDSEPVLKGVKLHYT

SEQ ID NO: 121 - protein, 672 aa, Betacoronavirus severe acute respiratory syndrome coronavirus 2
QCVNLTTRTQLPPAYTNSFTRGVYYPDKVFRSSVLHSTQDLFLPFFSNVTWFHAIHVSGTNGTKRFDNPVLPFNDGVYFASTEKSNIIRGWIFGTTLDSKTQSLLIVNNATNVVIKVCEFQFCNDPFLGVYYHKNNKSWMESEFRVYSSANNCTFEYVSQPFLMDLEGKQGNFKNLREFVFKNIDGYFKIYSKHTPINLVRDLPQGFSALEPLVDLPIGINITRFQTLLALHRSYLTPGDSSSGWTAGAAAYYVGYLQPRTFLLKYNENGTITDAVDCALDPLSETKCTLKSFTVEKGIYQTSNFRVQPTESIVRFPNITNLCPFGEVFNATRFASVYAWNRKRISNCVADYSVLYNSASFSTFKCYGVSPTKLNDLCFTNVYADSFVIRGDEVRQIAPGQTGKIADYNYKLPDDFTGCVIAWNSNNLDSKVGGNYNYLYRLFRKSNLKPFERDISTEIYQAGSTPCNGVEGFNCYFPLQSYGFQPTNGVGYQPYRVVVLSFELLHAPATVCGPKKSTNLVKNKCVNFNFNGLTGTGVLTESNKKFLPFQQFGRDIADTTDAVRDPQTLEILDITPCSFGGVSVITPGTNTSNQVAVLYQDVNCTEVPVAIHADQLTPTWRVYSTGSNVFQTRAGCLIGAEHVNNSYECDIPIGAGICASYQTQTNSPRRAR

SEQ ID NO: 122 - protein, 140 aa, Betacoronavirus severe acute respiratory syndrome coronavirus 2
NFNGLTGTGVLTESNKKFLPFQQFGRDIADTTDAVRDPQTLEILDITPCSFGGVSVITPGTNTSNQVAVLYQDVNCTEVPVAIHADQLTPTWRVYSTGSNVFQTRAGCLIGAEHVNNSYECDIPIGAGICASYQTQTNSP

SEQ ID NO: 123 - protein, 24 aa, Betacoronavirus severe acute respiratory syndrome coronavirus 2
WYIWLGFIAGLIAIVMVTIMLCCM

SEQ ID NO: 124 - protein, 36 aa, Betacoronavirus severe acute respiratory syndrome coronavirus 2
TSCCSCLKGCCSCGSCCKFDEDDSEPVLKGVKLHYT

SEQ ID NO: 125 - protein, 51 aa, Betacoronavirus severe acute respiratory syndrome coronavirus 2
DVDLGDISGINASVVNIQKEIDRLNEVAKNLNESLIDLQELGKYEQYIKWP

SEQ ID NO: 126 - protein, 197 aa, Betacoronavirus severe acute respiratory syndrome coronavirus 2
NITNLCPFGEVFNATRFASVYAWNRKRISNCVADYSVLYNSASFSTFKCYGVSPTKLNDLCFTNVYADSFVIRGDEVRQIAPGQTGKIADYNYKLPDDFTGCVIAWNSNNLDSKVGGNYNYLYRLFRKSNLKPFERDISTEIYQAGSTPCNGVEGFNCYFPLQSYGFQPTNGVGYQPYRVVVLSFELLHAPATVCGP

SEQ ID NO: 127 - protein, 3 aa, Artificial Sequence
  inactivated furin cleavage site
GGG

SEQ ID NO: 128 - protein, 4 aa, Artificial Sequence
  inactivated furin cleavage site
GGGG

SEQ ID NO: 129 - protein, 5 aa, Artificial Sequence
  inactivated furin cleavage site
GGGGG

SEQ ID NO: 130 - protein, 1272 aa, Artificial Sequence
  modified coronavirus S polypeptide
MFVFLVLLPLVSSQCVNLTTRTQLPPAYTNSFTRGVYYPDKVFRSSVLHSTQDLFLPFFSNVTWFHAIHVSGTNGTKRFANPVLPFNDGVYFASTEKSNIIRGWIFGTTLDSKTQSLLIVNNATNVVIKVCEFQFCNDPFLGVYYHKNNKSWMESEFRVYSSANNCTFEYVSQPFLMDLEGKQGNFKNLREFVFKNIDGYFKIYSKHTPINLVRGLPQGFSALEPLVDLPIGINITRFQTLHALHRSYLTPGDSSSGWTAGAAAYYVGYLQPRTFLLKYNENGTITDAVDCALDPLSETKCTLKSFTVEKGIYQTSNFRVQPTESIVRFPNITNLCPFGEVFNATRFASVYAWNRKRISNCVADYSVLYNSASFSTFKCYGVSPTKLNDLCFTNVYADSFVIRGDEVRQIAPGQTGNIADYNYKLPDDFTGCVIAWNSNNLDSKVGGNYNYLYRLFRKSNLKPFERDISTEIYQAGSTPCNGVKGFNCYFPLQSYGFQPTYGVGYQPYRVVVLSFELLHAPATVCGPKKSTNLVKNKCVNFNFNGLTGTGVLTESNKKFLPFQQFGRDIADTTDAVRDPQTLEILDITPCSFGGVSVITPGTNTSNQVAVLYQGVNCTEVPVAIHADQLTPTWRVYSTGSNVFQTRAGCLIGAEHVNNSYECDIPIGAGICASYQTQTNSPQQAQSVASQSIIAYTMSLGVENSVAYSNNSIAIPTNFTISVTTEILPVSMTKTSVDCTMYICGDSTECSNLLLQYGSFCTQLNRALTGIAVEQDKNTQEVFAQVKQIYKTPPIKDFGGNFSQILPDPSKPSKRSFIEDLLFNKVTLADAGFIKQYGDCLGDIAARDLICAQKFNGLTVLPPLLTDEMIAQYTSALLAGTITSGWTFGAGAALQIPFAMQMAYRFNGIGVTQNVLYENQKLIANQFNSAIGKIQDSLSSTASALGKLQDVVNQNAQALNTLVKQLSSNFGAISSVLNDILSRLDPPEAEVQIDRLITGRLQSLQTYVTQQLIRAAEIRASANLAATKMSECVLGQSKRVDFCGKGYHLMSFPQSAPHGVVFLHVTYVPAQEKNFTTAPAICHDGKAHFPREGVFVSNGTHWFVTQRNFYEPQIITTDNTFVSGNCDVVIGIVNNTVYDPLQPELDSFKEELDKYFKNHTSPDVDLGDISGINASVVNIQKEIDRLNEVAKNLNESLIDLQELGKYEQYIKWPWYIWLGFIAGLIAIVMVTIMLCCMTSCCSCLKGCCSCGSCCKFDEDDSEPVLKGVKLHYT

SEQ ID NO: 131 - DNA, 3822 bp, Artificial Sequence
  modified coronavirus S polypeptide
atgttcgtcttcctggtgctgctgcctctggtgtccagccagtgcgtgaacctgaccactaggactcagctgcctcccgcttacaccaactcattcactaggggtgtgtactacccagacaaggtcttccgctcctcagtgctgcactcaactcaggacctgttcctgcctttcttctccaacgtcacctggttccacgctatccacgtgtccggcaccaacggcactaagaggttcgccaaccccgtgctgccattcaacgacggagtctacttcgcttcaaccgagaagtccaacatcatcagaggatggatcttcggcaccactctggacagcaagactcagtctctgctgatcgtcaacaacgctaccaacgtggtcatcaaggtgtgcgaattccagttctgtaacgaccccttcctgggtgtctactaccacaagaacaacaagtcatggatggagtccgaattccgcgtctactccagcgctaacaactgcactttcgagtacgtgtcccagccattcctgatggacctggaaggaaagcagggtaacttcaagaacctgcgcgagttcgtgttcaagaacatcgacggctacttcaagatttacagcaagcacacccccatcaacctggtccgtggcctgccacagggattctctgctctggagcccctggtggacctgccaatcggcatcaacatcaccaggttccagactctgcacgccctgcacagatcctacctgactcccggagactcttcatccggttggaccgctggcgctgccgcttactacgtgggttacctgcagccacgcaccttcctgctgaagtacaacgaaaacggcaccatcactgacgccgtcgactgcgctctggacccactgtcagaaaccaagtgcactctgaagtccttcaccgtggagaagggaatctaccagacttcaaacttccgcgtgcagcctaccgaatccatcgtccgtttcccaaacatcactaacctgtgccctttcggagaggtcttcaacgccacccgcttcgcttccgtgtacgcctggaaccgcaagcgtatctcaaactgcgtcgctgactactccgtgctgtacaactcagcctccttcagcaccttcaagtgctacggagtgtcacccactaagctgaacgacctgtgcttcaccaacgtctacgctgactccttcgtgatccgcggtgacgaggtccgtcagatcgctccaggccagactggaaacatcgccgactacaactacaagctgcctgacgacttcaccggttgcgtcatcgcctggaacagcaacaacctggactctaaagtgggtggcaactacaactacctgtacaggctgttcagaaagtcaaacctgaagcccttcgagcgcgacatcagcactgaaatctaccaggctggttctaccccatgcaacggtgtcaagggcttcaactgctacttccctctgcagtcctacggcttccagcccacttacggtgtgggctaccagccataccgtgtggtcgtgctgagcttcgagctgctgcacgcccctgctactgtgtgcggacccaagaagtctaccaacctggtcaagaacaagtgcgtgaacttcaacttcaacggtctgaccggaactggtgtcctgaccgagagcaacaagaagttcctgcctttccagcagttcggtcgcgacatcgctgacaccactgacgccgtgcgtgaccctcagaccctggaaatcctggacatcactccctgctcattcggaggtgtctccgtgatcactcccggaaccaacacttctaaccaggtcgctgtgctgtaccagggtgtgaactgcaccgaagtcccagtggccatccacgctgaccagctgacccctacttggagggtgtactccaccggcagcaacgtcttccagactagagctggatgcctgatcggtgccgagcacgtcaacaacagctacgaatgcgacatccctatcggcgctggaatctgcgcctcttaccagacccagactaacagcccccagcaggctcagtctgtggcctctcagtcaatcatcgcctacaccatgtcactgggtgtcgaaaactccgtggcttactctaacaactcaatcgccatccctaccaacttcactatcagcgtgaccactgagatcctgcccgtcagcatgaccaagacttctgtggactgcactatgtacatctgcggcgacagcaccgaatgctctaacctgctgctgcagtacggttctttctgcacccagctgaaccgcgctctgactggcatcgccgtggagcaggacaagaacactcaggaagtcttcgctcaggtgaagcaaatctacaagaccccacctatcaaggacttcggcggattcaacttctcccagatcctgccagacccttccaagcccagcaagaggtctttcatcgaggacctgctgttcaacaaggtcactctggccgacgctggtttcatcaagcagtacggcgactgcctgggagacatcgctgctcgcgacctgatctgcgcccagaagttcaacggcctgaccgtgctgcccccactgctgactgacgaaatgatcgctcagtacactagcgccctgctggctggcaccatcacttcaggttggactttcggtgctggtgctgctctgcagatcccattcgctatgcagatggcctaccgtttcaacggaatcggtgtcacccagaacgtgctgtacgagaaccagaagctgatcgctaaccagttcaactcagccatcggcaagatccaggacagcctgagctctactgcctctgctctgggaaagctgcaggacgtcgtgaaccagaacgcccaggctctgaacaccctggtcaagcagctgtcatccaacttcggcgccatcagctctgtgctgaacgacatcctgtccaggctggaccctcccgaggctgaagtccagatcgacaggctgatcactggaagactgcagtcactgcagacctacgtgactcagcagctgatccgcgccgctgaaatccgtgcctccgctaacctggccgctaccaagatgagcgagtgcgtcctgggccagtctaagagagtggacttctgcggcaagggataccacctgatgtcattcccacagtccgcccctcacggagtcgtgttcctgcacgtcacctacgtgcccgctcaggagaagaacttcaccactgccccagctatctgccacgacggcaaggctcacttccctcgcgaaggagtcttcgtgagcaacggcacccactggttcgtcactcagcgtaacttctacgagccccagatcatcaccactgacaacactttcgtgtctggcaactgcgacgtggtcatcggtatcgtcaacaacaccgtgtacgaccctctgcagcccgagctggactcattcaaggaagagctggacaagtacttcaagaaccacacctcccctgacgtcgacctgggtgacatctcaggcatcaacgcctccgtcgtgaacatccagaaggagatcgaccgcctgaacgaagtggctaagaacctgaacgaaagcctgatcgacctgcaggagctgggcaagtacgaacagtacatcaagtggccatggtacatctggctgggattcatcgctggcctcatcgctatcgtgatggtgaccatcatgctgtgctgcatgacttcatgctgctcctgcctgaagggttgctgcagctgcggctcttgctgcaagttcgacgaggacgactctgaacctgtcctgaagggagtgaagctgcactacacctaa

SEQ ID NO: 132 - protein, 1259 aa, Artificial Sequence
  modified coronavirus S polypeptide
QCVNLTTRTQLPPAYTNSFTRGVYYPDKVFRSSVLHSTQDLFLPFFSNVTWFHAIHVSGTNGTKRFANPVLPFNDGVYFASTEKSNIIRGWIFGTTLDSKTQSLLIVNNATNVVIKVCEFQFCNDPFLGVYYHKNNKSWMESEFRVYSSANNCTFEYVSQPFLMDLEGKQGNFKNLREFVFKNIDGYFKIYSKHTPINLVRGLPQGFSALEPLVDLPIGINITRFQTLHALHRSYLTPGDSSSGWTAGAAAYYVGYLQPRTFLLKYNENGTITDAVDCALDPLSETKCTLKSFTVEKGIYQTSNFRVQPTESIVRFPNITNLCPFGEVFNATRFASVYAWNRKRISNCVADYSVLYNSASFSTFKCYGVSPTKLNDLCFTNVYADSFVIRGDEVRQIAPGQTGNIADYNYKLPDDFTGCVIAWNSNNLDSKVGGNYNYLYRLFRKSNLKPFERDISTEIYQAGSTPCNGVKGFNCYFPLQSYGFQPTYGVGYQPYRVVVLSFELLHAPATVCGPKKSTNLVKNKCVNFNFNGLTGTGVLTESNKKFLPFQQFGRDIADTTDAVRDPQTLEILDITPCSFGGVSVITPGTNTSNQVAVLYQGVNCTEVPVAIHADQLTPTWRVYSTGSNVFQTRAGCLIGAEHVNNSYECDIPIGAGICASYQTQTNSPQQAQSVASQSIIAYTMSLGVENSVAYSNNSIAIPTNFTISVTTEILPVSMTKTSVDCTMYICGDSTECSNLLLQYGSFCTQLNRALTGIAVEQDKNTQEVFAQVKQIYKTPPIKDFGGNFSQILPDPSKPSKRSFIEDLLFNKVTLADAGFIKQYGDCLGDIAARDLICAQKFNGLTVLPPLLTDEMIAQYTSALLAGTITSGWTFGAGAALQIPFAMQMAYRFNGIGVTQNVLYENQKLIANQFNSAIGKIQDSLSSTASALGKLQDVVNQNAQALNTLVKQLSSNFGAISSVLNDILSRLDPPEAEVQIDRLITGRLQSLQTYVTQQLIRAAEIRASANLAATKMSECVLGQSKRVDFCGKGYHLMSFPQSAPHGVVFLHVTYVPAQEKNFTTAPAICHDGKAHFPREGVFVSNGTHWFVTQRNFYEPQIITTDNTFVSGNCDVVIGIVNNTVYDPLQPELDSFKEELDKYFKNHTSPDVDLGDISGINASVVNIQKEIDRLNEVAKNLNESLIDLQELGKYEQYIKWPWYIWLGFIAGLIAIVMVTIMLCCMTSCCSCLKGCCSCGSCCKFDEDDSEPVLKGVKLHYT

SEQ ID NO: 133 - protein, 1258 aa, Artificial Sequence
  modified coronavirus S polypeptide
QCVNLTTRTQLPPAYTNSFTRGVYYPDKVFRSSVLHSTQDLFLPFFSNVTWFHAIHVSGTNGTKRFDNPVLPFNDGVYFASTEKSNIIRGWIFGTTLDSKTQSLLIVNNATNVVIKVCEFQFCNDPFLGVYYHKNNKSWMESEFRVYSSANNCTFEYVSQPFLMDLEGKQGNFKNLREFVFKNIDGYFKIYSKHTPINLVRDLPQGFSALEPLVDLPIGINITRFQTLLALHRSYLTPGDSSSGWTAGAAAYYVGYLQPRTFLLKYNENGTITDAVDCALDPLSETKCTLKSFTVEKGIYQTSNFRVQPTESIVRFPNITNLCPFGEVFNATRFASVYAWNRKRISNCVADYSVLYNSASFSTFKCYGVSPTKLNDLCFTNVYADSFVIRGDEVRQIAPGQTGKIADYNYKLPDDFTGCVIAWNSNNLDSKVGGNYNYLYRLFRKSNLKPFERDISTEIYQAGSTPCNGVEGFNCYFPLQSYGFQPTNGVGYQPYRVVVLSFELLHAPATVCGPKKSTNLVKNKCVNFNFNGLTGTGVLTESNKKFLPFQQFGRDIADTTDAVRDPQTLEILDITPCSFGGVSVITPGTNTSNQVAVLYQGVNCTEVPVAIHADQLTPTWRVYSTGSNVFQTRAGCLIGAEHVNNSYECDIPIGAGICASYQTQTNSPGGSVASQSIIAYTMSLGAENSVAYSNNSIAIPTNFTISVTTEILPVSMTKTSVDCTMYICGDSTECSNLLLQYGSFCTQLNRALTGIAVEQDKNTQEVFAQVKQIYKTPPIKDFGGFNFSQILPDPSKPSKRSFIEDLLFNKVTLADAGFIKQYGDCLGDIAARDLICAQKFNGLTVLPPLLTDEMIAQYTSALLAGTITSGWTFGAGAALQIPFAMQMAYRFNGIGVTQNVLYENQKLIANQFNSAIGKIQDSLSSTASALGKLQDVVNQNAQALNTLVKQLSSNFGAISSVLNDILSRLDPPEAEVQIDRLITGRLQSLQTYVTQQLIRAAEIRASANLAATKMSECVLGQSKRVDFCGKGYHLMSFPQSAPHGVVFLHVTYVPAQEKNFTTAPAICHDGKAHFPREGVFVSNGTHWFVTQRNFYEPQIITTDNTFVSGNCDVVIGIVNNTVYDPLQPELDSFKEELDKYFKNHTSPDVDLGDISGINASVVNIQKEIDRLNEVAKNLNESLIDLQELGKYEQYIKWPWYIWLGFIAGLIAIVMVTIMLCCMTSCCSCLKGCCSCGSCCKFDEDDSEPVLKGVKLHYT

SEQ ID NO: 134 - protein, 1271 aa, Artificial Sequence
  modified coronavirus S polypeptide
MFVFLVLLPLVSSQCVNLTTRTQLPPAYTNSFTRGVYYPDKVFRSSVLHSTQDLFLPFFSNVTWFHAIHVSGTNGTKRFDNPVLPFNDGVYFASTEKSNIIRGWIFGTTLDSKTQSLLIVNNATNVVIKVCEFQFCNDPFLGVYYHKNNKSWMESEFRVYSSANNCTFEYVSQPFLMDLEGKQGNFKNLREFVFKNIDGYFKIYSKHTPINLVRDLPQGFSALEPLVDLPIGINITRFQTLLALHRSYLTPGDSSSGWTAGAAAYYVGYLQPRTFLLKYNENGTITDAVDCALDPLSETKCTLKSFTVEKGIYQTSNFRVQPTESIVRFPNITNLCPFGEVFNATRFASVYAWNRKRISNCVADYSVLYNSASFSTFKCYGVSPTKLNDLCFTNVYADSFVIRGDEVRQIAPGQTGKIADYNYKLPDDFTGCVIAWNSNNLDSKVGGNYNYLYRLFRKSNLKPFERDISTEIYQAGSTPCNGVEGFNCYFPLQSYGFQPTNGVGYQPYRVVVLSFELLHAPATVCGPKKSTNLVKNKCVNFNFNGLTGTGVLTESNKKFLPFQQFGRDIADTTDAVRDPQTLEILDITPCSFGGVSVITPGTNTSNQVAVLYQGVNCTEVPVAIHADQLTPTWRVYSTGSNVFQTRAGCLIGAEHVNNSYECDIPIGAGICASYQTQTNSPGGSVASQSIIAYTMSLGAENSVAYSNNSIAIPTNFTISVTTEILPVSMTKTSVDCTMYICGDSTECSNLLLQYGSFCTQLNRALTGIAVEQDKNTQEVFAQVKQIYKTPPIKDFGGFNFSQILPDPSKPSKRSFIEDLLFNKVTLADAGFIKQYGDCLGDIAARDLICAQKFNGLTVLPPLLTDEMIAQYTSALLAGTITSGWTFGAGAALQIPFAMQMAYRFNGIGVTQNVLYENQKLIANQFNSAIGKIQDSLSSTASALGKLQDVVNQNAQALNTLVKQLSSNFGAISSVLNDILSRLDPPEAEVQIDRLITGRLQSLQTYVTQQLIRAAEIRASANLAATKMSECVLGQSKRVDFCGKGYHLMSFPQSAPHGVVFLHVTYVPAQEKNFTTAPAICHDGKAHFPREGVFVSNGTHWFVTQRNFYEPQIITTDNTFVSGNCDVVIGIVNNTVYDPLQPELDSFKEELDKYFKNHTSPDVDLGDISGINASVVNIQKEIDRLNEVAKNLNESLIDLQELGKYEQYIKWPWYIWLGFIAGLIAIVMVTIMLCCMTSCCSCLKGCCSCGSCCKFDEDDSEPVLKGVKLHYT

SEQ ID NO: 135 - protein, 3813 aa, Artificial Sequence
  modified coronavirus S polypeptide
ATGTTCGTCTTCCTGGTGCTGCTGCCTCTGGTGTCCAGCCAGTGCGTGAACCTGACCACTAGGACTCAGCTGCCTCCCGCTTACACCAACAGCTTCACTAGGGGTGTCTACTACCCTGACAAGGTCTTCCGCTCCTCAGTGCTGCACTCTACTCAGGACCTGTTCCTGCCCTTCTTCTCAAACGTGACCTGGTTCCACGCCATCTCCGGCACCAACGGCACTAAGAGGTTCGACAACCCCGTGCTGCCATTCAACGACGGCGTCTACTTCGCTTCAACCGAGAAGTCCAACATCATCAGAGGATGGATCTTCGGCACCACTCTGGACAGCAAGACTCAGTCTCTGCTGATCGTCAACAACGCCACCAACGTGGTCATCAAGGTGTGCGAATTCCAGTTCTGCAACGACCCATTCCTGGGTGTGTACCACAAGAACAACAAGTCATGGATGGAGTCCGAATTCCGCGTCTACTCCAGCGCTAACAACTGCACTTTCGAGTACGTGAGCCAGCCTTTCCTGATGGACCTGGAAGGAAAGCAGGGTAACTTCAAGAACCTGCGCGAGTTCGTGTTCAAGAACATCGACGGATACTTCAAGATTTACAGCAAGCACACCCCCATCAACCTGGTCCGTGACCTGCCACAGGGTTTCTCTGCTCTGGAGCCCCTGGTGGACCTGCCAATCGGCATCAACATCACCAGGTTCCAGACTCTGCTGGCTCTGCACCGCTCCTACCTGACTCCAGGTGACTCATCTTCTGGATGGACTGCTGGAGCTGCTGCTTACTACGTGGGTTACCTGCAGCCTCGCACCTTCCTGCTGAAGTACAACGAAAACGGCACCATCACTGACGCCGTCGACTGCGCTCTGGACCCTCTGTCAGAAACCAAGTGCACTCTGAAGTCCTTCACCGTGGAGAAGGGTATCTACCAGACTAGCAACTTCCGCGTGCAGCCCACCGAATCTATCGTCCGTTTCCCAAACATCACTAACCTGTGCCCTTTCGGCGAGGTCTTCAACGCCACCCGCTTCGCTTCCGTGTACGCCTGGAACCGCAAGCGTATCTCAAACTGCGTCGCTGACTACTCCGTGCTGTACAACTCAGCCTCCTTCAGCACCTTCAAGTGCTACGGTGTGTCACCCACTAAGCTGAACGACCTGTGCTTCACCAACGTCTACGCCGACTCCTTCGTGATCCGCGGCGACGAGGTCCGTCAGATCGCTCCAGGCCAGACTGGAAAGATCGCCGACTACAACTACAAGCTGCCTGACGACTTCACCGGCTGCGTCATCGCTTGGAACAGCAACAACCTGGACTCTAAAGTGGGTGGCAACTACAACTACCTGTACAGGCTGTTCAGAAAGAGCAACCTGAAGCCCTTCGAGCGCGACATCAGCACTGAAATCTACCAGGCTGGCTCTACCCCATGCAACGGTGTCGAGGGCTTCAACTGCTACTTCCCTCTGCAGTCTTACGGATTCCAGCCCACTTACGGTGTGGGCTACCAGCCATACCGTGTGGTCGTGCTGAGCTTCGAACTGCTGCACGCCCCTGCTACTGTGTGCGGACCCAAGAAGTCTACCAACCTGGTCAAGAACAAGTGCGTGAACTTCAACTTCAACGGTCTGACCGGAACTGGTGTCCTGACCGAGAGCAACAAGAAGTTCCTGCCCTTCCAGCAGTTCGGTCGCGACATCGACGACACCACTGACGCCGTGCGTGACCCTCAGACCCTGGAAATCCTGGACATCACTCCCTGCTCATTCGGAGGTGTCTCCGTGATCACTCCAGGAACCAACACTTCTAACCAGGTCGCTGTGCTGTACCAGGGTGTCAACTGCACCGAGGTCCCAGTGGCCATCCACGCTGACCAGCTGACCCCTACTTGGAGGGTGTACTCCACCGGCAGCAACGTGTTCCAGACTAGAGCTGGTTGCCTGATCGGCGCCGAGCACGTGAACAACAGCTACGAATGCGACATCCCAATCGGCGCTGGAATCTGCGCCTCTTACCAGACCCAGACTAACAGCCACCAGCAGGCTCAGTCTGTCGCCTCTCAGTCAATCATCGCTTACACTATGTCACTGGGCGCTGAAAACTCCGTGGCCTACTCTAACAACTCAATCGCCATCCCTATCAACTTCACCATCTCAGTGACCACTGAGATCCTGCCCGTCAGCATGACCAAGACTTCTGTGGACTGCACTATGTACATCTGCGGAGACAGCACCGAATGCTCTAACCTGCTGCTGCAGTACGGCTCCTTCTGCACCCAGCTGAACCGCGCTCTGACTGGAATCGCCGTGGAGCAGGACAAGAACACTCAGGAAGTCTTCGCTCAGGTGAAGCAAATCTACAAGACCCCACCTATCAAGGACTTCGGCGGATTCAACTTCTCCCAGATCCTGCCAGACCCTTCCAAGCCAAGCAAGAGGTCTTTCATCGAGGACCTGCTGTTCAACAAGGTCACCCTGGCCGACGCTGGCTTCATCAAGCAGTACGGAGACTGCCTGGGTGACATCGCCGCTCGCGACCTGATCTGCGCTCAGAAGTTCAACGGACTGACCGTGCTGCCCCCACTGCTGACTGACGAAATGATCGCCCAGTACACTTCAGCCCTGCTGGCTGGAACCATCACTTCTGGTTGGACCTTCGGTGCTGGTGCTGCTCTGCAGATCCCTTTCGCTATGCAGATGGCCTACCGTTTCAACGGAATCGGTGTCACCCAGAACGTGCTGTACGAGAACCAGAAGCTGATCGCTAACCAGTTCAACTCCGCCATCGGCAAGATCCAGGACAGCCTGAGCTCTACTGCCTCTGCTCTGGGAAAGCTGCAGGACGTCGTGAACCAGAACGCCCAGGCTCTGAACACCCTGGTCAAGCAGCTGTCATCCAACTTCGGAGCCATCAGCTCTGTGCTGAACGACATCCTCGCTAGGCTGGACCCTCCCGAGGCTGAAGTCCAGATCGACAGGCTGATCACTGGTAGACTGCAGTCACTGCAGACCTACGTGACTCAGCAGCTGATCCGCGCCGCTGAAATCCGTGCCTCCGCTAACCTGGCCGCTACCAAGATGAGCGAGTGCGTCCTGGGACAGTCTAAGAGAGTGGACTTCTGCGGCAAGGGATACCACCTGATGTCATTCCCACAGTCCGCTCCTCACGGTGTCGTGTTCCTGCACGTCACCTACGTGCCCGCCCAGGAGAAGAACTTCACCACTGCCCCAGCTATCTGCCACGACGGCAAGGCTCACTTCCCCCGCGAAGGTGTCTTCGTGTCAAACGGCACCCACTGGTTCGTCACTCAGCGTAACTTCTACGAGCCACAGATCATCACCACTCACAACACTTTCGTGTCCGGAAACTGCGACGTGGTCATCGGTATCGTCAACAACACCGTGTACGACCCTCTGCAGCCCGAGCTGGACTCATTCAAGGAAGAGCTGGACAAGTACTTCAAGAACCACACCTCCCCTGACGTCGACCTGGGCGACATCTCAGGAATCAACGCTTCCGTCGTGAACATCCAGAAGGAGATCGACCGCCTGAACGAAGTGGCCAAGAACCTGAACGAATCACTGATCGACCTGCAGGAGCTGGGCAAGTACGAACAGTACATCAAGTGGCCTTGGTACATCTGGCTGGGTTTCATCGCTGGCCTCATCGCTATCGTGATGGTGACCATCATGCTGTGCTGCATGACTTCATGCTGCTCCTGCCTGAAGGGCTGCTGCAGCTGCGGATCTTGCTGCAAGTTCGACGAGGACGACTCCGAACCCGTCCTGAAGGGAGTGAAGCTGCACTACACCTAA

SEQ ID NO: 136 - protein, 1270 aa, Artificial Sequence
  modified coronavirus S polypeptide
MFVFLVLLPLVSSQCVNLTTRTQLPPAYTNSFTRGVYYPDKVFRSSVLHSTQDLFLPFFSNVTWFHAISGTNGTKRFDNPVLPFNDGVYFASTEKSNIIRGWIFGTTLDSKTQSLLIVNNATNVVIKVCEFQFCNDPFLGVYHKNNKSWMESEFRVYSSANNCTFEYVSQPFLMDLEGKQGNFKNLREFVFKNIDGYFKIYSKHTPINLVRDLPQGFSALEPLVDLPIGINITRFQTLLALHRSYLTPGDSSSGWTAGAAAYYVGYLQPRTFLLKYNENGTITDAVDCALDPLSETKCTLKSFTVEKGIYQTSNFRVQPTESIVRFPNITNLCPFGEVFNATRFASVYAWNRKRISNCVADYSVLYNSASFSTFKCYGVSPTKLNDLCFTNVYADSFVIRGDEVRQIAPGQTGKIADYNYKLPDDFTGCVIAWNSNNLDSKVGGNYNYLYRLFRKSNLKPFERDISTEIYQAGSTPCNGVEGFNCYFPLQSYGFQPTYGVGYQPYRVVVLSFELLHAPATVCGPKKSTNLVKNKCVNFNFNGLTGTGVLTESNKKFLPFQQFGRDIDDTTDAVRDPQTLEILDITPCSFGGVSVITPGTNTSNQVAVLYQGVNCTEVPVAIHADQLTPTWRVYSTGSNVFQTRAGCLIGAEHVNNSYECDIPIGAGICASYQTQTNSHQQAQSVASQSIIAYTMSLGAENSVAYSNNSIAIPINFTISVTTEILPVSMTKTSVDCTMYICGDSTECSNLLLQYGSFCTQLNRALTGIAVEQDKNTQEVFAQVKQIYKTPPIKDFGGFNFSQILPDPSKPSKRSFIEDLLFNKVTLADAGFIKQYGDCLGDIAARDLICAQKFNGLTVLPPLLTDEMIAQYTSALLAGTITSGWTFGAGAALQIPFAMQMAYRFNGIGVTQNVLYENQKLIANQFNSAIGKIQDSLSSTASALGKLQDVVNQNAQALNTLVKQLSSNFGAISSVLNDILARLDPPEAEVQIDRLITGRLQSLQTYVTQQLIRAAEIRASANLAATKMSECVLGQSKRVDFCGKGYHLMSFPQSAPHGVVFLHVTYVPAQEKNFTTAPAICHDGKAHFPREGVFVSNGTHWFVTQRNFYEPQIITTHNTFVSGNCDVVIGIVNNTVYDPLQPELDSFKEELDKYFKNHTSPDVDLGDISGINASVVNIQKEIDRLNEVAKNLNESLIDLQELGKYEQYIKWPWYIWLGFIAGLIAIVMVTIMLCCMTSCCSCLKGCCSCGSCCKFDEDDSEPVLKGVKLHYT

SEQ ID NO: 137 - protein, 1268 aa, Artificial Sequence
  modified coronavirus S polypeptide
MFVFLVLLPLVSSQCVNLTTRTQLPPAYTNSFTRGVYYPDKVFRSSVLHSTQDLFLPFFSNVTWFHAISGTNGTKRFDNPVLPFNDGVYFASTEKSNIIRGWIFGTTLDSKTQSLLIVNNATNVVIKVCEFQFCNDPFLGVYHKNNKSWMESEFRVYSSANNCTFEYVSQPFLMDLEGKQGNFKNLREFVFKNIDGYFKIYSKHTPINLVRDLPQGFSALEPLVDLPIGINITRFQTLLALHRSYLTPGDSSSGWTAGAAAYYVGYLQPRTFLLKYNENGTITDAVDCALDPLSETKCTLKSFTVEKGIYQTSNFRVQPTESIVRFPNITNLCPFGEVFNATRFASVYAWNRKRISNCVADYSVLYNSASFSTFKCYGVSPTKLNDLCFTNVYADSFVIRGDEVRQIAPGQTGKIADYNYKLPDDFTGCVIAWNSNNLDSKVGGNYNYLYRLFRKSNLKPFERDISTEIYQAGSTPCNGVEGFNCYFPLQSYGFQPTYGVGYQPYRVVVLSFELLHAPATVCGPKKSTNLVKNKCVNFNFNGLTGTGVLTESNKKFLPFQQFGRDIDDTTDAVRDPQTLEILDITPCSFGGVSVITPGTNTSNQVAVLYQGVNCTEVPVAIHADQLTPTWRVYSTGSNVFQTRAGCLIGAEHVNNSYECDIPIGAGICASYQTQTNSHGGSVASQSIIAYTMSLGAENSVAYSNNSIAIPINFTISVTTEILPVSMTKTSVDCTMYICGDSTECSNLLLQYGSFCTQLNRALTGIAVEQDKNTQEVFAQVKQIYKTPPIKDFGGFNFSQILPDPSKPSKRSFIEDLLFNKVTLADAGFIKQYGDCLGDIAARDLICAQKFNGLTVLPPLLTDEMIAQYTSALLAGTITSGWTFGAGAALQIPFAMQMAYRFNGIGVTQNVLYENQKLIANQFNSAIGKIQDSLSSTASALGKLQDVVNQNAQALNTLVKQLSSNFGAISSVLNDILARLDPPEAEVQIDRLITGRLQSLQTYVTQQLIRAAEIRASANLAATKMSECVLGQSKRVDFCGKGYHLMSFPQSAPHGVVFLHVTYVPAQEKNFTTAPAICHDGKAHFPREGVFVSNGTHWFVTQRNFYEPQIITTHNTFVSGNCDVVIGIVNNTVYDPLQPELDSFKEELDKYFKNHTSPDVDLGDISGINASVVNIQKEIDRLNEVAKNLNESLIDLQELGKYEQYIKWPWYIWLGFIAGLIAIVMVTIMLCCMTSCCSCLKGCCSCGSCCKFDEDDSEPVLKGVKLHYT

SEQ ID NO: 138 - protein, 1255 aa, Artificial Sequence
  modified coronavirus S polypeptide
QCVNLTTRTQLPPAYTNSFTRGVYYPDKVFRSSVLHSTQDLFLPFFSNVTWFHAISGTNGTKRFDNPVLPFNDGVYFASTEKSNIIRGWIFGTTLDSKTQSLLIVNNATNVVIKVCEFQFCNDPFLGVYHKNNKSWMESEFRVYSSANNCTFEYVSQPFLMDLEGKQGNFKNLREFVFKNIDGYFKIYSKHTPINLVRDLPQGFSALEPLVDLPIGINITRFQTLLALHRSYLTPGDSSSGWTAGAAAYYVGYLQPRTFLLKYNENGTITDAVDCALDPLSETKCTLKSFTVEKGIYQTSNFRVQPTESIVRFPNITNLCPFGEVFNATRFASVYAWNRKRISNCVADYSVLYNSASFSTFKCYGVSPTKLNDLCFTNVYADSFVIRGDEVRQIAPGQTGKIADYNYKLPDDFTGCVIAWNSNNLDSKVGGNYNYLYRLFRKSNLKPFERDISTEIYQAGSTPCNGVEGFNCYFPLQSYGFQPTYGVGYQPYRVVVLSFELLHAPATVCGPKKSTNLVKNKCVNFNFNGLTGTGVLTESNKKFLPFQQFGRDIDDTTDAVRDPQTLEILDITPCSFGGVSVITPGTNTSNQVAVLYQGVNCTEVPVAIHADQLTPTWRVYSTGSNVFQTRAGCLIGAEHVNNSYECDIPIGAGICASYQTQTNSHGGSVASQSIIAYTMSLGAENSVAYSNNSIAIPINFTISVTTEILPVSMTKTSVDCTMYICGDSTECSNLLLQYGSFCTQLNRALTGIAVEQDKNTQEVFAQVKQIYKTPPIKDFGGFNFSQILPDPSKPSKRSFIEDLLFNKVTLADAGFIKQYGDCLGDIAARDLICAQKFNGLTVLPPLLTDEMIAQYTSALLAGTITSGWTFGAGAALQIPFAMQMAYRFNGIGVTQNVLYENQKLIANQFNSAIGKIQDSLSSTASALGKLQDVVNQNAQALNTLVKQLSSNFGAISSVLNDILARLDPPEAEVQIDRLITGRLQSLQTYVTQQLIRAAEIRASANLAATKMSECVLGQSKRVDFCGKGYHLMSFPQSAPHGVVFLHVTYVPAQEKNFTTAPAICHDGKAHFPREGVFVSNGTHWFVTQRNFYEPQIITTHNTFVSGNCDVVIGIVNNTVYDPLQPELDSFKEELDKYFKNHTSPDVDLGDISGINASVVNIQKEIDRLNEVAKNLNESLIDLQELGKYEQYIKWPWYIWLGFIAGLIAIVMVTIMLCCMTSCCSCLKGCCSCGSCCKFDEDDSEPVLKGVKLHYT

SEQ ID NO: 139 - DNA, 3807 bp, Artificial Sequence
  modified coronavirus S polypeptide
atgttcgtcttcctggtgctgctgcctctggtgtccagccagtgcgtgaacctgaccactaggactcagctgcctcccgcttacaccaacagcttcactaggggtgtctactaccctgacaaggtcttccgctcctcagtgctgcactctactcaggacctgttcctgcccttcttctcaaacgtgacctggttccacgccatctccggcaccaacggcactaagaggttcgacaaccccgtgctgccattcaacgacggcgtctacttcgcttcaaccgagaagtccaacatcatcagaggatggatcttcggcaccactctggacagcaagactcagtctctgctgatcgtcaacaacgccaccaacgtggtcatcaaggtgtgcgaattccagttctgcaacgacccattcctgggtgtgtaccacaagaacaacaagtcatggatggagtccgaattccgcgtctactccagcgctaacaactgcactttcgagtacgtgagccagcctttcctgatggacctggaaggaaagcagggtaacttcaagaacctgcgcgagttcgtgttcaagaacatcgacggatacttcaagatttacagcaagcacacccccatcaacctggtccgtgacctgccacagggtttctctgctctggagcccctggtggacctgccaatcggcatcaacatcaccaggttccagactctgctggctctgcaccgctcctacctgactccaggtgactcatcttctggatggactgctggagctgctgcttactacgtgggttacctgcagcctcgcaccttcctgctgaagtacaacgaaaacggcaccatcactgacgccgtcgactgcgctctggaccctctgtcagaaaccaagtgcactctgaagtccttcaccgtggagaagggtatctaccagactagcaacttccgcgtgcagcccaccgaatctatcgtccgtttcccaaacatcactaacctgtgccctttcggcgaggtcttcaacgccacccgcttcgcttccgtgtacgcctggaaccgcaagcgtatctcaaactgcgtcgctgactactccgtgctgtacaactcagcctccttcagcaccttcaagtgctacggtgtgtcacccactaagctgaacgacctgtgcttcaccaacgtctacgccgactccttcgtgatccgcggcgacgaggtccgtcagatcgctccaggccagactggaaagatcgccgactacaactacaagctgcctgacgacttcaccggctgcgtcatcgcttggaacagcaacaacctggactctaaagtgggtggcaactacaactacctgtacaggctgttcagaaagagcaacctgaagcccttcgagcgcgacatcagcactgaaatctaccaggctggctctaccccatgcaacggtgtcgagggcttcaactgctacttccctctgcagtcttacggattccagcccacttacggtgtgggctaccagccataccgtgtggtcgtgctgagcttcgaactgctgcacgcccctgctactgtgtgcggacccaagaagtctaccaacctggtcaagaacaagtgcgtgaacttcaacttcaacggtctgaccggaactggtgtcctgaccgagagcaacaagaagttcctgcccttccagcagttcggtcgcgacatcgacgacaccactgacgccgtgcgtgaccctcagaccctggaaatcctggacatcactccctgctcattcggaggtgtctccgtgatcactccaggaaccaacacttctaaccaggtcgctgtgctgtaccagggtgtcaactgcaccgaggtcccagtggccatccacgctgaccagctgacccctacttggagggtgtactccaccggcagcaacgtgttccagactagagctggttgcctgatcggcgccgagcacgtgaacaacagctacgaatgcgacatcccaatcggcgctggaatctgcgcctcttaccagacccagactaacagccacggtggttctgtcgcctctcagtcaatcatcgcttacactatgtcactgggcgctgaaaactccgtggcctactctaacaactcaatcgccatccctatcaacttcaccatctcagtgaccactgagatcctgcccgtcagcatgaccaagacttctgtggactgcactatgtacatctgcggagacagcaccgaatgctctaacctgctgctgcagtacggctccttctgcacccagctgaaccgcgctctgactggaatcgccgtggagcaggacaagaacactcaggaagtcttcgctcaggtgaagcaaatctacaagaccccacctatcaaggacttcggcggattcaacttctcccagatcctgccagacccttccaagccaagcaagaggtctttcatcgaggacctgctgttcaacaaggtcaccctggccgacgctggcttcatcaagcagtacggagactgcctgggtgacatcgccgctcgcgacctgatctgcgctcagaagttcaacggactgaccgtgctgcccccactgctgactgacgaaatgatcgcccagtacacttcagccctgctggctggaaccatcacttctggttggaccttcggtgctggtgctgctctgcagatccctttcgctatgcagatggcctaccgtttcaacggaatcggtgtcacccagaacgtgctgtacgagaaccagaagctgatcgctaaccagttcaactccgccatcggcaagatccaggacagcctgagctctactgcctctgctctgggaaagctgcaggacgtcgtgaaccagaacgcccaggctctgaacaccctggtcaagcagctgtcatccaacttcggagccatcagctctgtgctgaacgacatcctcgctaggctggaccctcccgaggctgaagtccagatcgacaggctgatcactggtagactgcagtcactgcagacctacgtgactcagcagctgatccgcgccgctgaaatccgtgcctccgctaacctggccgctaccaagatgagcgagtgcgtcctgggacagtctaagagagtggacttctgcggcaagggataccacctgatgtcattcccacagtccgctcctcacggtgtcgtgttcctgcacgtcacctacgtgcccgcccaggagaagaacttcaccactgccccagctatctgccacgacggcaaggctcacttcccccgcgaaggtgtcttcgtgtcaaacggcacccactggttcgtcactcagcgtaacttctacgagccacagatcatcaccactcacaacactttcgtgtccggaaactgcgacgtggtcatcggtatcgtcaacaacaccgtgtacgaccctctgcagcccgagctggactcattcaaggaagagctggacaagtacttcaagaaccacacctcccctgacgtcgacctgggcgacatctcaggaatcaacgcttccgtcgtgaacatccagaaggagatcgaccgcctgaacgaagtggccaagaacctgaacgaatcactgatcgacctgcaggagctgggcaagtacgaacagtacatcaagtggccttggtacatctggctgggtttcatcgctggcctcatcgctatcgtgatggtgaccatcatgctgtgctgcatgacttcatgctgctcctgcctgaagggctgctgcagctgcggatcttgctgcaagttcgacgaggacgactccgaacccgtcctgaagggagtgaagctgcactacacctaa

SEQ ID NO: 140 - protein, 1270 aa, Artificial Sequence
  modified coronavirus S polypeptide
MFVFLVLLPLVSSQCVNLTTRTQLPPAYTNSFTRGVYYPDKVFRSSVLHSTQDLFLPFFSNVTWFHAIHVSGTNGTKRFANPVLPFNDGVYFASTEKSNIIRGWIFGTTLDSKTQSLLIVNNATNVVIKVCEFQFCNDPFLGVYYHKNNKSWMESEFRVYSSANNCTFEYVSQPFLMDLEGKQGNFKNLREFVFKNIDGYFKIYSKHTPINLVRGLPQGFSALEPLVDLPIGINITRFQTLHALHRSYLTPGDSSSGWTAGAAAYYVGYLQPRTFLLKYNENGTITDAVDCALDPLSETKCTLKSFTVEKGIYQTSNFRVQPTESIVRFPNITNLCPFGEVFNATRFASVYAWNRKRISNCVADYSVLYNSASFSTFKCYGVSPTKLNDLCFTNVYADSFVIRGDEVRQIAPGQTGNIADYNYKLPDDFTGCVIAWNSNNLDSKVGGNYNYLYRLFRKSNLKPFERDISTEIYQAGSTPCNGVKGFNCYFPLQSYGFQPTYGVGYQPYRVVVLSFELLHAPATVCGPKKSTNLVKNKCVNFNFNGLTGTGVLTESNKKFLPFQQFGRDIADTTDAVRDPQTLEILDITPCSFGGVSVITPGTNTSNQVAVLYQGVNCTEVPVAIHADQLTPTWRVYSTGSNVFQTRAGCLIGAEHVNNSYECDIPIGAGICASYQTQTNSPGGSVASQSIIAYTMSLGVENSVAYSNNSIAIPTNFTISVTTEILPVSMTKTSVDCTMYICGDSTECSNLLLQYGSFCTQLNRALTGIAVEQDKNTQEVFAQVKQIYKTPPIKDFGGNFSQILPDPSKPSKRSFIEDLLFNKVTLADAGFIKQYGDCLGDIAARDLICAQKFNGLTVLPPLLTDEMIAQYTSALLAGTITSGWTFGAGAALQIPFAMQMAYRFNGIGVTQNVLYENQKLIANQFNSAIGKIQDSLSSTASALGKLQDVVNQNAQALNTLVKQLSSNFGAISSVLNDILSRLDPPEAEVQIDRLITGRLQSLQTYVTQQLIRAAEIRASANLAATKMSECVLGQSKRVDFCGKGYHLMSFPQSAPHGVVFLHVTYVPAQEKNFTTAPAICHDGKAHFPREGVFVSNGTHWFVTQRNFYEPQIITTDNTFVSGNCDVVIGIVNNTVYDPLQPELDSFKEELDKYFKNHTSPDVDLGDISGINASVVNIQKEIDRLNEVAKNLNESLIDLQELGKYEQYIKWPWYIWLGFIAGLIAIVMVTIMLCCMTSCCSCLKGCCSCGSCCKFDEDDSEPVLKGVKLHYT

SEQ ID NO: 141 - protein, 1257 aa, Artificial Sequence
  modified coronavirus S polypeptide
QCVNLTTRTQLPPAYTNSFTRGVYYPDKVFRSSVLHSTQDLFLPFFSNVTWFHAIHVSGTNGTKRFANPVLPFNDGVYFASTEKSNIIRGWIFGTTLDSKTQSLLIVNNATNVVIKVCEFQFCNDPFLGVYYHKNNKSWMESEFRVYSSANNCTFEYVSQPFLMDLEGKQGNFKNLREFVFKNIDGYFKIYSKHTPINLVRGLPQGFSALEPLVDLPIGINITRFQTLHALHRSYLTPGDSSSGWTAGAAAYYVGYLQPRTFLLKYNENGTITDAVDCALDPLSETKCTLKSFTVEKGIYQTSNFRVQPTESIVRFPNITNLCPFGEVFNATRFASVYAWNRKRISNCVADYSVLYNSASFSTFKCYGVSPTKLNDLCFTNVYADSFVIRGDEVRQIAPGQTGNIADYNYKLPDDFTGCVIAWNSNNLDSKVGGNYNYLYRLFRKSNLKPFERDISTEIYQAGSTPCNGVKGFNCYFPLQSYGFQPTYGVGYQPYRVVVLSFELLHAPATVCGPKKSTNLVKNKCVNFNFNGLTGTGVLTESNKKFLPFQQFGRDIADTTDAVRDPQTLEILDITPCSFGGVSVITPGTNTSNQVAVLYQGVNCTEVPVAIHADQLTPTWRVYSTGSNVFQTRAGCLIGAEHVNNSYECDIPIGAGICASYQTQTNSPGGSVASQSIIAYTMSLGVENSVAYSNNSIAIPTNFTISVTTEILPVSMTKTSVDCTMYICGDSTECSNLLLQYGSFCTQLNRALTGIAVEQDKNTQEVFAQVKQIYKTPPIKDFGGNFSQILPDPSKPSKRSFIEDLLFNKVTLADAGFIKQYGDCLGDIAARDLICAQKFNGLTVLPPLLTDEMIAQYTSALLAGTITSGWTFGAGAALQIPFAMQMAYRFNGIGVTQNVLYENQKLIANQFNSAIGKIQDSLSSTASALGKLQDVVNQNAQALNTLVKQLSSNFGAISSVLNDILSRLDPPEAEVQIDRLITGRLQSLQTYVTQQLIRAAEIRASANLAATKMSECVLGQSKRVDFCGKGYHLMSFPQSAPHGVVFLHVTYVPAQEKNFTTAPAICHDGKAHFPREGVFVSNGTHWFVTQRNFYEPQIITTDNTFVSGNCDVVIGIVNNTVYDPLQPELDSFKEELDKYFKNHTSPDVDLGDISGINASVVNIQKEIDRLNEVAKNLNESLIDLQELGKYEQYIKWPWYIWLGFIAGLIAIVMVTIMLCCMTSCCSCLKGCCSCGSCCKFDEDDSEPVLKGVKLHYT

SEQ ID NO: 142 - DNA, 3816 bp, Artificial Sequence
  modified coronavirus S polypeptide
atgttcgtcttcctggtgctgctgcctctggtgtccagccagtgcgtgaacctgaccactaggactcagctgcctcccgcttacaccaactcattcactaggggtgtgtactacccagacaaggtcttccgctcctcagtgctgcactcaactcaggacctgttcctgcctttcttctccaacgtcacctggttccacgctatccacgtgtccggcaccaacggcactaagaggttcgccaaccccgtgctgccattcaacgacggagtctacttcgcttcaaccgagaagtccaacatcatcagaggatggatcttcggcaccactctggacagcaagactcagtctctgctgatcgtcaacaacgctaccaacgtggtcatcaaggtgtgcgaattccagttctgtaacgaccccttcctgggtgtctactaccacaagaacaacaagtcatggatggagtccgaattccgcgtctactccagcgctaacaactgcactttcgagtacgtgtcccagccattcctgatggacctggaaggaaagcagggtaacttcaagaacctgcgcgagttcgtgttcaagaacatcgacggctacttcaagatttacagcaagcacacccccatcaacctggtccgtggcctgccacagggattctctgctctggagcccctggtggacctgccaatcggcatcaacatcaccaggttccagactctgcacgccctgcacagatcctacctgactcccggagactcttcatccggttggaccgctggcgctgccgcttactacgtgggttacctgcagccacgcaccttcctgctgaagtacaacgaaaacggcaccatcactgacgccgtcgactgcgctctggacccactgtcagaaaccaagtgcactctgaagtccttcaccgtggagaagggaatctaccagacttcaaacttccgcgtgcagcctaccgaatccatcgtccgtttcccaaacatcactaacctgtgccctttcggagaggtcttcaacgccacccgcttcgcttccgtgtacgcctggaaccgcaagcgtatctcaaactgcgtcgctgactactccgtgctgtacaactcagcctccttcagcaccttcaagtgctacggagtgtcacccactaagctgaacgacctgtgcttcaccaacgtctacgctgactccttcgtgatccgcggtgacgaggtccgtcagatcgctccaggccagactggaaacatcgccgactacaactacaagctgcctgacgacttcaccggttgcgtcatcgcctggaacagcaacaacctggactctaaagtgggtggcaactacaactacctgtacaggctgttcagaaagtcaaacctgaagcccttcgagcgcgacatcagcactgaaatctaccaggctggttctaccccatgcaacggtgtcaagggcttcaactgctacttccctctgcagtcctacggcttccagcccacttacggtgtgggctaccagccataccgtgtggtcgtgctgagcttcgagctgctgcacgcccctgctactgtgtgcggacccaagaagtctaccaacctggtcaagaacaagtgcgtgaacttcaacttcaacggtctgaccggaactggtgtcctgaccgagagcaacaagaagttcctgcctttccagcagttcggtcgcgacatcgctgacaccactgacgccgtgcgtgaccctcagaccctggaaatcctggacatcactccctgctcattcggaggtgtctccgtgatcactcccggaaccaacacttctaaccaggtcgctgtgctgtaccagggtgtgaactgcaccgaagtcccagtggccatccacgctgaccagctgacccctacttggagggtgtactccaccggcagcaacgtcttccagactagagctggatgcctgatcggtgccgagcacgtcaacaacagctacgaatgcgacatccctatcggcgctggaatctgcgcctcttaccagacccagactaacagcccaggtggttctgtggcctctcagtcaatcatcgcctacaccatgtcactgggtgtcgaaaactccgtggcttactctaacaactcaatcgccatccctaccaacttcactatcagcgtgaccactgagatcctgcccgtcagcatgaccaagacttctgtggactgcactatgtacatctgcggcgacagcaccgaatgctctaacctgctgctgcagtacggttctttctgcacccagctgaaccgcgctctgactggcatcgccgtggagcaggacaagaacactcaggaagtcttcgctcaggtgaagcaaatctacaagaccccacctatcaaggacttcggcggattcaacttctcccagatcctgccagacccttccaagcccagcaagaggtctttcatcgaggacctgctgttcaacaaggtcactctggccgacgctggtttcatcaagcagtacggcgactgcctgggagacatcgctgctcgcgacctgatctgcgcccagaagttcaacggcctgaccgtgctgcccccactgctgactgacgaaatgatcgctcagtacactagcgccctgctggctggcaccatcacttcaggttggactttcggtgctggtgctgctctgcagatcccattcgctatgcagatggcctaccgtttcaacggaatcggtgtcacccagaacgtgctgtacgagaaccagaagctgatcgctaaccagttcaactcagccatcggcaagatccaggacagcctgagctctactgcctctgctctgggaaagctgcaggacgtcgtgaaccagaacgcccaggctctgaacaccctggtcaagcagctgtcatccaacttcggcgccatcagctctgtgctgaacgacatcctgtccaggctggaccctcccgaggctgaagtccagatcgacaggctgatcactggaagactgcagtcactgcagacctacgtgactcagcagctgatccgcgccgctgaaatccgtgcctccgctaacctggccgctaccaagatgagcgagtgcgtcctgggccagtctaagagagtggacttctgcggcaagggataccacctgatgtcattcccacagtccgcccctcacggagtcgtgttcctgcacgtcacctacgtgcccgctcaggagaagaacttcaccactgccccagctatctgccacgacggcaaggctcacttccctcgcgaaggagtcttcgtgagcaacggcacccactggttcgtcactcagcgtaacttctacgagccccagatcatcaccactgacaacactttcgtgtctggcaactgcgacgtggtcatcggtatcgtcaacaacaccgtgtacgaccctctgcagcccgagctggactcattcaaggaagagctggacaagtacttcaagaaccacacctcccctgacgtcgacctgggtgacatctcaggcatcaacgcctccgtcgtgaacatccagaaggagatcgaccgcctgaacgaagtggctaagaacctgaacgaaagcctgatcgacctgcaggagctgggcaagtacgaacagtacatcaagtggccatggtacatctggctgggattcatcgctggcctcatcgctatcgtgatggtgaccatcatgctgtgctgcatgacttcatgctgctcctgcctgaagggttgctgcagctgcggctcttgctgcaagttcgacgaggacgactctgaacctgtcctgaagggagtgaagctgcactacacctaa

SEQ ID NO: 143 - protein, 1269 aa, Artificial Sequence
  modified coronavirus S polypeptide
MFVFLVLLPLVSSQCVNFTTRTQLPPAYTNSFTRGVYYPDKVFRSSVLHSTQDLFLPFFSNVTWFHAIHVSGTNGTKRFANPVLPFNDGVYFASTEKSNIIRGWIFGTTLDSKTQSLLIVNNATNVVIKVCEFQFCNDPFLGVYYHKNNKSWMESEFRVYSSANNCTFEYVSQPFLMDLEGKQGNFKNLREFVFKNIDGYFKIYSKHTPINLVRGLPQGFSALEPLVDLPIGINITRFQTLHRSYLTPGDSSSGWTAGAAAYYVGYLQPRTFLLKYNENGTITDAVDCALDPLSETKCTLKSFTVEKGIYQTSNFRVQPTESIVRFPNITNLCPFGEVFNATRFASVYAWNRKRISNCVADYSVLYNSASFSTFKCYGVSPTKLNDLCFTNVYADSFVIRGDEVRQIAPGQTGNIADYNYKLPDDFTGCVIAWNSNNLDSKVGGNYNYLYRLFRKSNLKPFERDISTEIYQAGSTPCNGVKGFNCYFPLQSYGFQPTYGVGYQPYRVVVLSFELLHAPATVCGPKKSTNLVKNKCVNFNFNGLTGTGVLTESNKKFLPFQQFGRDIADTTDAVRDPQTLEILDITPCSFGGVSVITPGTNTSNQVAVLYQGVNCTEVPVAIHADQLTPTWRVYSTGSNVFQTRAGCLIGAEHVNNSYECDIPIGAGICASYQTQTNSPQQAQSVASQSIIAYTMSLGVENSVAYSNNSIAIPTNFTISVTTEILPVSMTKTSVDCTMYICGDSTECSNLLLQYGSFCTQLNRALTGIAVEQDKNTQEVFAQVKQIYKTPPIKDFGGNFSQILPDPSKPSKRSFIEDLLFNKVTLADAGFIKQYGDCLGDIAARDLICAQKFNGLTVLPPLLTDEMIAQYTSALLAGTITSGWTFGAGAALQIPFAMQMAYRFNGIGVTQNVLYENQKLIANQFNSAIGKIQDSLSSTASALGKLQDVVNQNAQALNTLVKQLSSNFGAISSVLNDILSRLDPPEAEVQIDRLITGRLQSLQTYVTQQLIRAAEIRASANLAATKMSECVLGQSKRVDFCGKGYHLMSFPQSAPHGVVFLHVTYVPAQEKNFTTAPAICHDGKAHFPREGVFVSNGTHWFVTQRNFYEPQIITTDNTFVSGNCDVVIGIVNNTVYDPLQPELDSFKEELDKYFKNHTSPDVDLGDISGINASVVNIQKEIDRLNEVAKNLNESLIDLQELGKYEQYIKWPWYIWLGFIAGLIAIVMVTIMLCCMTSCCSCLKGCCSCGSCCKFDEDDSEPVLKGVKLHYT

SEQ ID NO: 144 - protein, 1256 aa, Artificial Sequence
  modified coronavirus S polypeptide
QCVNFTTRTQLPPAYTNSFTRGVYYPDKVFRSSVLHSTQDLFLPFFSNVTWFHAIHVSGTNGTKRFANPVLPFNDGVYFASTEKSNIIRGWIFGTTLDSKTQSLLIVNNATNVVIKVCEFQFCNDPFLGVYYHKNNKSWMESEFRVYSSANNCTFEYVSQPFLMDLEGKQGNFKNLREFVFKNIDGYFKIYSKHTPINLVRGLPQGFSALEPLVDLPIGINITRFQTLHRSYLTPGDSSSGWTAGAAAYYVGYLQPRTFLLKYNENGTITDAVDCALDPLSETKCTLKSFTVEKGIYQTSNFRVQPTESIVRFPNITNLCPFGEVFNATRFASVYAWNRKRISNCVADYSVLYNSASFSTFKCYGVSPTKLNDLCFTNVYADSFVIRGDEVRQIAPGQTGNIADYNYKLPDDFTGCVIAWNSNNLDSKVGGNYNYLYRLFRKSNLKPFERDISTEIYQAGSTPCNGVKGFNCYFPLQSYGFQPTYGVGYQPYRVVVLSFELLHAPATVCGPKKSTNLVKNKCVNFNFNGLTGTGVLTESNKKFLPFQQFGRDIADTTDAVRDPQTLEILDITPCSFGGVSVITPGTNTSNQVAVLYQGVNCTEVPVAIHADQLTPTWRVYSTGSNVFQTRAGCLIGAEHVNNSYECDIPIGAGICASYQTQTNSPQQAQSVASQSIIAYTMSLGVENSVAYSNNSIAIPTNFTISVTTEILPVSMTKTSVDCTMYICGDSTECSNLLLQYGSFCTQLNRALTGIAVEQDKNTQEVFAQVKQIYKTPPIKDFGGNFSQILPDPSKPSKRSFIEDLLFNKVTLADAGFIKQYGDCLGDIAARDLICAQKFNGLTVLPPLLTDEMIAQYTSALLAGTITSGWTFGAGAALQIPFAMQMAYRFNGIGVTQNVLYENQKLIANQFNSAIGKIQDSLSSTASALGKLQDVVNQNAQALNTLVKQLSSNFGAISSVLNDILSRLDPPEAEVQIDRLITGRLQSLQTYVTQQLIRAAEIRASANLAATKMSECVLGQSKRVDFCGKGYHLMSFPQSAPHGVVFLHVTYVPAQEKNFTTAPAICHDGKAHFPREGVFVSNGTHWFVTQRNFYEPQIITTDNTFVSGNCDVVIGIVNNTVYDPLQPELDSFKEELDKYFKNHTSPDVDLGDISGINASVVNIQKEIDRLNEVAKNLNESLIDLQELGKYEQYIKWPWYIWLGFIAGLIAIVMVTIMLCCMTSCCSCLKGCCSCGSCCKFDEDDSEPVLKGVKLHYT

SEQ ID NO: 145 - DNA, 3812 bp, Artificial Sequence
  modified coronavirus S polypeptide
atgttcgtcttcctggtgctgctgcctctggtgtccagccagtgcgtgaacttcaccactaggactcagctgcctcccgcttacaccaactcattcactaggggtgtgtactacccagacaaggtcttccgctcctcagtgctgcactcaactcaggacctgttcctgcctttcttctccaacgtcacctggttccacgctatccacgtgtccggcaccaacggcactaagaggttcgccaaccccgtgctgccattcaacgacggagtctacttcgcttcaaccgagaagtccaacatcatcagaggatggatcttcggcaccactctggacagcaagactcagtctctgctgatcgtcaacaacgctaccaacgtggtcatcaaggtgtgcgaattccagttctgtaacgaccccttcctgggtgtctactaccacaagaacaacaagtcatggatggagtccgaattccgcgtctactccagcgctaacaactgcactttcgagtacgtgtcccagccattcctgatggacctggaaggaaagcagggtaacttcaagaacctgcgcgagttcgtgttcaagaacatcgacggctacttcaagatttacagcaagcacacccccatcaacctggtccgtggcctgccacagggattctctgctctggagcccctggtggacctgccaatcggcatcaacatcaccaggttccagactctgcacagatcctacctgactcccggagactcttcatccggttggaccgctggcgctgccgcttactacgtgggttacctgcagccacgcaccttcctgctgaagtacaacgaaaacggcaccatcactgacgccgtcgactgcgctctggacccactgtcagaaaccaagtgcactctgaagtccttcaccgtggagaagggaatctaccagacttcaaacttccgcgtgcagcctaccgaatccatcgtccgtttcccaaacatcactaacctgtgccctttcggagaggtcttcaacgccacccgcttcgcttccgtgtacgcctggaaccgcaagcgtatctcaaactgcgtcgctgactactccgtgctgtacaactcagcctccttcagcaccttcaagtgctacggagtgtcacccactaagctgaacgacctgtgcttcaccaacgtctacgctgactccttcgtgatccgcggtgacgaggtccgtcagatcgctccaggccagactggaaacatcgccgactacaactacaagctgcctgacgacttcaccggttgcgtcatcgcctggaacagcaacaacctggactctaaagtgggtggcaactacaactacctgtacaggctgttcagaaagtcaaacctgaagcccttcgagcgcgacatcagcactgaaatctaccaggctggttctaccccatgcaacggtgtcaagggcttcaactgctacttccctctgcagtcctacggcttccagcccacttacggtgtgggctaccagccataccgtgtggtcgtgctgagcttcgagctgctgcacgcccctgctactgtgtgcggacccaagaagtctaccaacctggtcaagaacaagtgcgtgaacttcaacttcaacggtctgaccggaactggtgtcctgaccgagagcaacaagaagttcctgcctttccagcagttcggtcgcgacatcgctgacaccactgacgccgtgcgtgaccctcagaccctggaaatcctggacatcactccctgctcattcggaggtgtctccgtgatcactcccggaaccaacacttctaaccaggtcgctgtgctgtaccagggtgtgaactgcaccgaagtcccagtggccatccacgctgaccagctgacccctacttggagggtgtactccaccggcagcaacgtcttccagactagagctggatgcctgatcggtgccgagcacgtcaacaacagctacgaatgcgacatccctatcggcgctggaatctgcgcctcttaccagacccagactaacagcccccagcaggctcagtctgtggcctctcagtcaatcatcgcctacaccatgtcactgggtgtcgaaaactccgtggcttactctaacaactcaatcgccatccctaccaacttcactatcagcgtgaccactgagatcctgcccgtcagcatgaccaagacttctgtggactgcactatgtacatctgcggcgacagcaccgaatgctctaacctgctgctgcagtacggttctttctgcacccagctgaaccgcgctctgactggcatcgccgtggagcaggacaagaacactcaggaagtcttcgctcaggtgaagcaaatctacaagaccccacctatcaaggacttcggcggattcaacttctcccagatcctgccagacccttccaagcccagcaagaggtctttcatcgaggacctgctgttcaacaaggtcactctggccgacgctggtttcatcaagcagtacggcgactgcctgggagacatcgctgctcgcgacctgatctgcgcccagaagttcaacggcctgaccgtgctgcccccactgctgactgacgaaatgatcgctcagtacactagcgccctgctggctggcaccatcacttcaggttggactttcggtgctggtgctgctctgcagatcccattcgctatgcagatggcctaccgtttcaacggaatcggtgtcacccagaacgtgctgtacgagaaccagaagctgatcgctaaccagttcaactcagccatcggcaagatccaggacagcctgagctctactgcctctgctctgggaaagctgcaggacgtcgtgaaccagaacgcccaggctctgaacaccctggtcaagcagctgtcatccaacttcggcgccatcagctctgtgctgaacgacatcctgtccaggctggaccctcccgaggctgaagtccagatcgacaggctgatcactggaagactgcagtcactgcagacctacgtgactcagcagctgatccgcgccgctgaaatccgtgcctccgctaacctggccgctaccaagatgagcgagtgcgtcctgggccagtctaagagagtggacttctgcggcaagggataccacctgatgtcattcccacagtccgcccctcacggagtcgtgttcctgcacgtcacctacgtgcccgctcaggagaagaacttcaccactgccccagctatctgccacgacggcaaggctcacttccctcgcgaaggagtcttcgtgagcaacggcacccactggttcgtcactcagcgtaacttctacgagccccagatcatcaccactgacaacactttcgtgtctggcaactgcgacgtggtcatcggtatcgtcaacaacaccgtgtacgaccctctgcagcccgagctggactcattcaaggaagagctggacaagtacttcaagaaccacacctcccctgacgtcgacctgggtgacatctcaggcatcaacgcctccgtcgtgaacatccagaaggagatcgaccgcctgaacgaagtggctaagaacctgaacgaaagcctgatcgacctgcaggagctgggcaagtacgaacagtacatcaagtggccatggtacatctggctgggattcatcgctggcctcatcgctatcgtgatggtgaccatcatgctgtgctgcatgacttcatgctgctcctgcctgaagggttgctgcagctgcggctcttgctgcaagttcgacgaggacgactctgaaccttcctgaagggagtgaagctgcactacacctaa

SEQ ID NO: 146 - protein, 1267 aa, Artificial Sequence
  modified coronavirus S polypeptide
MFVFLVLLPLVSSQCVNFTTRTQLPPAYTNSFTRGVYYPDKVFRSSVLHSTQDLFLPFFSNVTWFHAIHVSGTNGTKRFANPVLPFNDGVYFASTEKSNIIRGWIFGTTLDSKTQSLLIVNNATNVVIKVCEFQFCNDPFLGVYYHKNNKSWMESEFRVYSSANNCTFEYVSQPFLMDLEGKQGNFKNLREFVFKNIDGYFKIYSKHTPINLVRGLPQGFSALEPLVDLPIGINITRFQTLHRSYLTPGDSSSGWTAGAAAYYVGYLQPRTFLLKYNENGTITDAVDCALDPLSETKCTLKSFTVEKGIYQTSNFRVQPTESIVRFPNITNLCPFGEVFNATRFASVYAWNRKRISNCVADYSVLYNSASFSTFKCYGVSPTKLNDLCFTNVYADSFVIRGDEVRQIAPGQTGNIADYNYKLPDDFTGCVIAWNSNNLDSKVGGNYNYLYRLFRKSNLKPFERDISTEIYQAGSTPCNGVKGFNCYFPLQSYGFQPTYGVGYQPYRVVVLSFELLHAPATVCGPKKSTNLVKNKCVNFNFNGLTGTGVLTESNKKFLPFQQFGRDIADTTDAVRDPQTLEILDITPCSFGGVSVITPGTNTSNQVAVLYQGVNCTEVPVAIHADQLTPTWRVYSTGSNVFQTRAGCLIGAEHVNNSYECDIPIGAGICASYQTQTNSPGGSVASQSIIAYTMSLGVENSVAYSNNSIAIPTNFTISVTTEILPVSMTKTSVDCTMYICGDSTECSNLLLQYGSFCTQLNRALTGIAVEQDKNTQEVFAQVKQIYKTPPIKDFGGNFSQILPDPSKPSKRSFIEDLLFNKVTLADAGFIKQYGDCLGDIAARDLICAQKFNGLTVLPPLLTDEMIAQYTSALLAGTITSGWTFGAGAALQIPFAMQMAYRFNGIGVTQNVLYENQKLIANQFNSAIGKIQDSLSSTASALGKLQDVVNQNAQALNTLVKQLSSNFGAISSVLNDILSRLDPPEAEVQIDRLITGRLQSLQTYVTQQLIRAAEIRASANLAATKMSECVLGQSKRVDFCGKGYHLMSFPQSAPHGVVFLHVTYVPAQEKNFTTAPAICHDGKAHFPREGVFVSNGTHWFVTQRNFYEPQIITTDNTFVSGNCDVVIGIVNNTVYDPLQPELDSFKEELDKYFKNHTSPDVDLGDISGINASVVNIQKEIDRLNEVAKNLNESLIDLQELGKYEQYIKWPWYIWLGFIAGLIAIVMVTIMLCCMTSCCSCLKGCCSCGSCCKFDEDDSEPVLKGVKLHYT

SEQ ID NO: 147 - protein, 1254 aa, Artificial Sequence
  modified coronavirus S polypeptide
QCVNFTTRTQLPPAYTNSFTRGVYYPDKVFRSSVLHSTQDLFLPFFSNVTWFHAIHVSGTNGTKRFANPVLPFNDGVYFASTEKSNIIRGWIFGTTLDSKTQSLLIVNNATNVVIKVCEFQFCNDPFLGVYYHKNNKSWMESEFRVYSSANNCTFEYVSQPFLMDLEGKQGNFKNLREFVFKNIDGYFKIYSKHTPINLVRGLPQGFSALEPLVDLPIGINITRFQTLHRSYLTPGDSSSGWTAGAAAYYVGYLQPRTFLLKYNENGTITDAVDCALDPLSETKCTLKSFTVEKGIYQTSNFRVQPTESIVRFPNITNLCPFGEVFNATRFASVYAWNRKRISNCVADYSVLYNSASFSTFKCYGVSPTKLNDLCFTNVYADSFVIRGDEVRQIAPGQTGNIADYNYKLPDDFTGCVIAWNSNNLDSKVGGNYNYLYRLFRKSNLKPFERDISTEIYQAGSTPCNGVKGFNCYFPLQSYGFQPTYGVGYQPYRVVVLSFELLHAPATVCGPKKSTNLVKNKCVNFNFNGLTGTGVLTESNKKFLPFQQFGRDIADTTDAVRDPQTLEILDITPCSFGGVSVITPGTNTSNQVAVLYQGVNCTEVPVAIHADQLTPTWRVYSTGSNVFQTRAGCLIGAEHVNNSYECDIPIGAGICASYQTQTNSPGGSVASQSIIAYTMSLGVENSVAYSNNSIAIPTNFTISVTTEILPVSMTKTSVDCTMYICGDSTECSNLLLQYGSFCTQLNRALTGIAVEQDKNTQEVFAQVKQIYKTPPIKDFGGNFSQILPDPSKPSKRSFIEDLLFNKVTLADAGFIKQYGDCLGDIAARDLICAQKFNGLTVLPPLLTDEMIAQYTSALLAGTITSGWTFGAGAALQIPFAMQMAYRFNGIGVTQNVLYENQKLIANQFNSAIGKIQDSLSSTASALGKLQDVVNQNAQALNTLVKQLSSNFGAISSVLNDILSRLDPPEAEVQIDRLITGRLQSLQTYVTQQLIRAAEIRASANLAATKMSECVLGQSKRVDFCGKGYHLMSFPQSAPHGVVFLHVTYVPAQEKNFTTAPAICHDGKAHFPREGVFVSNGTHWFVTQRNFYEPQIITTDNTFVSGNCDVVIGIVNNTVYDPLQPELDSFKEELDKYFKNHTSPDVDLGDISGINASVVNIQKEIDRLNEVAKNLNESLIDLQELGKYEQYIKWPWYIWLGFIAGLIAIVMVTIMLCCMTSCCSCLKGCCSCGSCCKFDEDDSEPVLKGVKLHYT

SEQ ID NO: 148 - DNA, 3804 bp, Artificial Sequence
  modified coronavirus S polypeptide
atgttcgtcttcctggtgctgctgcctctggtgtccagccagtgcgtgaacttcaccactaggactcagctgcctcccgcttacaccaactcattcactaggggtgtgtactacccagacaaggtcttccgctcctcagtgctgcactcaactcaggacctgttcctgcctttcttctccaacgtcacctggttccacgctatccacgtgtccggcaccaacggcactaagaggttcgccaaccccgtgctgccattcaacgacggagtctacttcgcttcaaccgagaagtccaacatcatcagaggatggatcttcggcaccactctggacagcaagactcagtctctgctgatcgtcaacaacgctaccaacgtggtcatcaaggtgtgcgaattccagttctgtaacgaccccttcctgggtgtctactaccacaagaacaacaagtcatggatggagtccgaattccgcgtctactccagcgctaacaactgcactttcgagtacgtgtcccagccattcctgatggacctggaaggaaagcagggtaacttcaagaacctgcgcgagttcgtgttcaagaacatcgacggctacttcaagatttacagcaagcacacccccatcaacctggtccgtggcctgccacagggattctctgctctggagcccctggtggacctgccaatcggcatcaacatcaccaggttccagactctgcacagatcctacctgactcccggagactcttcatccggttggaccgctggcgctgccgcttactacgtgggttacctgcagccacgcaccttcctgctgaagtacaacgaaaacggcaccatcactgacgccgtcgactgcgctctggacccactgtcagaaaccaagtgcactctgaagtccttcaccgtggagaagggaatctaccagacttcaaacttccgcgtgcagcctaccgaatccatcgtccgtttcccaaacatcactaacctgtgccctttcggagaggtcttcaacgccacccgcttcgcttccgtgtacgcctggaaccgcaagcgtatctcaaactgcgtcgctgactactccgtgctgtacaactcagcctccttcagcaccttcaagtgctacggagtgtcacccactaagctgaacgacctgtgcttcaccaacgtctacgctgactccttcgtgatccgcggtgacgaggtccgtcagatcgctccaggccagactggaaacatcgccgactacaactacaagctgcctgacgacttcaccggttgcgtcatcgcctggaacagcaacaacctggactctaaagtgggtggcaactacaactacctgtacaggctgttcagaaagtcaaacctgaagcccttcgagcgcgacatcagcactgaaatctaccaggctggttctaccccatgcaacggtgtcaagggcttcaactgctacttccctctgcagtcctacggcttccagcccacttacggtgtgggctaccagccataccgtgtggtcgtgctgagcttcgagctgctgcacgcccctgctactgtgtgcggacccaagaagtctaccaacctggtcaagaacaagtgcgtgaacttcaacttcaacggtctgaccggaactggtgtcctgaccgagagcaacaagaagttcctgcctttccagcagttcggtcgcgacatcgctgacaccactgacgccgtgcgtgaccctcagaccctggaaatcctggacatcactccctgctcattcggaggtgtctccgtgatcactcccggaaccaacacttctaaccaggtcgctgtgctgtaccagggtgtgaactgcaccgaagtcccagtggccatccacgctgaccagctgacccctacttggagggtgtactccaccggcagcaacgtcttccagactagagctggatgcctgatcggtgccgagcacgtcaacaacagctacgaatgcgacatccctatcggcgctggaatctgcgcctcttaccagacccagactaacagcccaggtggttctgtggcctctcagtcaatcatcgcctacaccatgtcactgggtgtcgaaaactccgtggcttactctaacaactcaatcgccatccctaccaacttcactatcagcgtgaccactgagatcctgcccgtcagcatgaccaagacttctgtggactgcactatgtacatctgcggcgacagcaccgaatgctctaacctgctgctgcagtacggttctttctgcacccagctgaaccgcgctctgactggcatcgccgtggagcaggacaagaacactcaggaagtcttcgctcaggtgaagcaaatctacaagaccccacctatcaaggacttcggcggattcaacttctcccagatcctgccagacccttccaagcccagcaagaggtctttcatcgaggacctgctgttcaacaaggtcactctggccgacgctggtttcatcaagcagtacggcgactgcctgggagacatcgctgctcgcgacctgatctgcgcccagaagttcaacggcctgaccgtgctgcccccactgctgactgacgaaatgatcgctcagtacactagcgccctgctggctggcaccatcacttcaggttggactttcggtgctggtgctgctctgcagatcccattcgctatgcagatggcctaccgtttcaacggaatcggtgtcacccagaacgtgctgtacgagaaccagaagctgatcgctaaccagttcaactcagccatcggcaagatccaggacagcctgagctctactgcctctgctctgggaaagctgcaggacgtcgtgaaccagaacgcccaggctctgaacaccctggtcaagcagctgtcatccaacttcggcgccatcagctctgtgctgaacgacatcctgtccaggctggaccctcccgaggctgaagtccagatcgacaggctgatcactggaagactgcagtcactgcagacctacgtgactcagcagctgatccgcgccgctgaaatccgtgcctccgctaacctggccgctaccaagatgagcgagtgcgtcctgggccagtctaagagagtggacttctgcggcaagggataccacctgatgtcattcccacagtccgcccctcacggagtcgtgttcctgcacgtcacctacgtgcccgctcaggagaagaacttcaccactgccccagctatctgccacgacggcaaggctcacttccctcgcgaaggagtcttcgtgagcaacggcacccactggttcgtcactcagcgtaacttctacgagccccagatcatcaccactgacaacactttcgtgtctggcaactgcgacgtggtcatcggtatcgtcaacaacaccgtgtacgaccctctgcagcccgagctggactcattcaaggaagagctggacaagtacttcaagaaccacacctcccctgacgtcgacctgggtgacatctcaggcatcaacgcctccgtcgtgaacatccagaaggagatcgaccgcctgaacgaagtggctaagaacctgaacgaaagcctgatcgacctgcaggagctgggcaagtacgaacagtacatcaagtggccatggtacatctggctgggattcatcgctggcctcatcgctatcgtgatggtgaccatcatgctgtgctgcatgacttcatgctgctcctgcctgaagggttgctgcagctgcggctcttgctgcaagttcgacgaggacgactctgaacctgtcctgaagggagtgaagctgcactacacc

SEQ ID NO: 149 - protein, 1273 aa, Artificial Sequence
  modified coronavirus S polypeptide
MFVFLVLLPLVSSQCVNFTNRTQLPSAYTNSFTRGVYYPDKVFRSSVLHSTQDLFLPFFSNVTWFHAIHVSGTNGTKRFDNPVLPFNDGVYFASTEKSNIIRGWIFGTTLDSKTQSLLIVNNATNVVIKVCEFQFCNYPFLGVYYHKNNKSWMESEFRVYSSANNCTFEYVSQPFLMDLEGKQGNFKNLSEFVFKNIDGYFKIYSKHTPINLVRDLPQGFSALEPLVDLPIGINITRFQTLLALHRSYLTPGDSSSGWTAGAAAYYVGYLQPRTFLLKYNENGTITDAVDCALDPLSETKCTLKSFTVEKGIYQTSNFRVQPTESIVRFPNITNLCPFGEVFNATRFASVYAWNRKRISNCVADYSVLYNSASFSTFKCYGVSPTKLNDLCFTNVYADSFVIRGDEVRQIAPGQTGTIADYNYKLPDDFTGCVIAWNSNNLDSKVGGNYNYLYRLFRKSNLKPFERDISTEIYQAGSTPCNGVKGFNCYFPLQSYGFQPTYGVGYQPYRVVVLSFELLHAPATVCGPKKSTNLVKNKCVNFNFNGLTGTGVLTESNKKFLPFQQFGRDIADTTDAVRDPQTLEILDITPCSFGGVSVITPGTNTSNQVAVLYQGVNCTEVPVAIHADQLTPTWRVYSTGSNVFQTRAGCLIGAEYVNNSYECDIPIGAGICASYQTQTNSPQQAQSVASQSIIAYTMSLGAENSVAYSNNSIAIPTNFTISVTTEILPVSMTKTSVDCTMYICGDSTECSNLLLQYGSFCTQLNRALTGIAVEQDKNTQEVFAQVKQIYKTPPIKDFGGFNFSQILPDPSKPSKRSFIEDLLFNKVTLADAGFIKQYGDCLGDIAARDLICAQKFNGLTVLPPLLTDEMIAQYTSALLAGTITSGWTFGAGAALQIPFAMQMAYRFNGIGVTQNVLYENQKLIANQFNSAIGKIQDSLSSTASALGKLQDVVNQNAQALNTLVKQLSSNFGAISSVLNDILSRLDPPEAEVQIDRLITGRLQSLQTYVTQQLIRAAEIRASANLAAIKMSECVLGQSKRVDFCGKGYHLMSFPQSAPHGVVFLHVTYVPAQEKNFTTAPAICHDGKAHFPREGVFVSNGTHWFVTQRNFYEPQIITTDNTFVSGNCDVVIGIVNNTVYDPLQPELDSFKEELDKYFKNHTSPDVDLGDISGINASFVNIQKEIDRLNEVAKNLNESLIDLQELGKYEQYIKWPWYIWLGFIAGLIAIVMVTIMLCCMTSCCSCLKGCCSCGSCCKFDEDDSEPVLKGVKLHYT

SEQ ID NO: 150 - DNA, 3822 bp, Artificial Sequence
  modified coronavirus S polypeptide
atgttcgtcttcctggtgctgctgcctctggtgtccagccagtgcgtgaacttcaccaaccgcactcagctgcctagcgcttacaccaactctttcactaggggtgtgtactaccccgacaaggtcttccgctcctcagtgctgcactctactcaggacctgttcctgcccttcttctctaacgtcacctggttccacgccatccacgtgagcggcaccaacggcactaagaggttcgacaacccagtgctgcctttcaacgacggtgtctacttcgcttcaaccgagaagtccaacatcatcagaggatggatcttcggcaccactctggacagcaagactcagtctctgctgatcgtcaacaacgccaccaacgtggtcatcaaggtgtgcgaattccagttctgcaactacccattcctgggcgtctactaccacaagaacaacaagtcatggatggagtccgaattccgcgtctactccagcgctaacaactgcactttcgagtacgtgtcccagcctttcctgatggacctggaaggaaagcagggtaacttcaagaacctgtcagagttcgtgttcaagaacatcgacggatacttcaagatttactccaagcacaccccaatcaacctggtccgtgacctgcctcagggtttctcagctctggagccactggtggacctgcctatcggcatcaacatcaccaggttccagactctgctggctctgcacagatcctacctgactccaggtgactcatcttctggatggactgctggagctgctgcttactacgtgggttacctgcagcctcgcaccttcctgctgaagtacaacgaaaacggcaccatcactgacgccgtcgactgcgctctggaccctctgagcgaaaccaagtgcactctgaagtctttcaccgtggagaagggtatctaccagactagcaacttccgcgtgcagcccaccgaatctatcgtccgtttccctaacatcactaacctgtgccccttcggcgaggtcttcaacgccacccgtttcgcttccgtgtacgcctggaaccgcaagcgtatcagcaactgcgtcgctgactactctgtgctgtacaactcagcctccttcagcactttcaagtgctacggtgtgagccctactaagctgaacgacctgtgcttcaccaacgtctacgccgactctttcgtgatccgcggcgacgaggtccgtcagatcgctccaggccagaccggaactatcgccgactacaactacaagctgcctgacgacttcaccggctgcgtcatcgcttggaactcaaacaacctggactccaaagtgggtggcaactacaactacctgtacaggctgttcagaaagtcaaacctgaagcccttcgagagggacatctcaactgaaatctaccaggccggctccaccccatgcaacggtgtcaagggcttcaactgctacttccccctgcagtcctacggattccagccaacttacggtgtgggctaccagccttacagagtggtcgtgctgtcattcgaactcctccacgctcctgctactgtgtgcggaccaaagaagtccaccaacctggtcaagaacaagtgcgtgaacttcaacttcaacggtctgaccggaactggtgtcctgaccgagtcaaacaagaagttcctgcccttccagcagttcggtcgcgacatcgctgacactaccgacgccgtgcgtgacccccagaccctggaaatcctggacatcactccatgcagcttcggaggtgtctctgtgatcactccaggaaccaacacttccaaccaggtcgctgtgctgtaccagggtgtcaactgcaccgaagtccctgtggccatccacgctgaccagctgacccccacttggagggtgtactccaccggcagcaacgtcttccagactagagctggttgcctgatcggcgccgagtacgtgaacaactcatacgaatgcgacatccctatcggcgctggaatctgcgcctcctaccagacccagactaactcaccccagcaggctcagtccgtcgcctctcagtcaatcatcgcttacaccatgagcctgggcgctgaaaactctgtggcctactctaacaactcaatcgccatccccaccaacttcactatcagcgtgaccactgagatcctgccagtctcaatgaccaagacttccgtggactgcactatgtacatctgcggagacagcaccgaatgctctaacctgctgctgcagtacggctctttctgcacccagctgaacagggctctgactggaatcgccgtggagcaggacaagaacactcaggaagtcttcgctcaggtgaagcaaatctacaagacccctcccatcaaggacttcggcggattcaacttctcccagatcctgcctgacccctccaagcccagcaagcgctctttcatcgaggacctgctgttcaacaaggtcaccctggccgacgctggcttcatcaagcagtacggagactgcctgggtgacatcgccgctcgtgacctgatctgcgctcagaagttcaacggactgaccgtgctgccacctctgctgactgacgaaatgatcgcccagtacacttcagccctgctggctggaaccatcacttctggttggaccttcggtgctggtgctgctctgcagatcccattcgctatgcagatggcctaccgcttcaacggaatcggtgtcacccagaacgtgctgtacgagaaccagaagctgatcgctaaccagttcaacagcgccatcggcaagatccaggactcactgagctctactgcctccgctctgggaaagctgcaggacgtcgtgaaccagaacgcccaggctctgaacaccctggtcaagcagctgtcatccaacttcggagctatcagctctgtgctgaacgacatcctctcccgcctggaccctcctgaggctgaagtccagatcgacaggctgatcactggtagactgcagagcctgcagacctacgtgactcagcagctgatccgcgccgctgaaatccgtgcctctgctaacctggctgctatcaagatgtcagagtgcgtcctgggacagtccaagagagtggacttctgcggcaagggataccacctgatgtcattccctcagtccgctccccacggtgtcgtgttcctgcacgtcacctacgtgccagcccaggagaagaacttcaccactgcccctgctatctgccacgacggcaaggctcacttcccccgcgaaggtgtcttcgtgagcaacggcacccactggttcgtcactcagcgtaacttctacgagccacagatcatcaccactgacaacactttcgtgtctggaaactgcgacgtggtcatcggtatcgtcaacaacaccgtgtacgaccccctgcagccagagctggacagcttcaaggaagagctggacaagtacttcaagaaccacacctctcccgacgtggacctgggcgacatcagcggaatcaacgcttctttcgtcaacatccagaaggagatcgaccgtctgaacgaagtggccaagaacctgaacgaatcactgatcgacctgcaggagctgggcaagtacgaacagtacatcaagtggccatggtacatctggctgggtttcatcgctggcctcatcgctatcgtgatggtgaccatcatgctgtgctgcatgacttcatgctgctcctgcctgaagggctgctgcagctgcggatcttgctgcaagttcgacgaggacgactccgaacctgtcctgaagggagtgaagctgcactacacctaa

SEQ ID NO: 151 - protein, 1260 aa, Artificial Sequence
  modified coronavirus S polypeptide
QCVNFTNRTQLPSAYTNSFTRGVYYPDKVFRSSVLHSTQDLFLPFFSNVTWFHAIHVSGTNGTKRFDNPVLPFNDGVYFASTEKSNIIRGWIFGTTLDSKTQSLLIVNNATNVVIKVCEFQFCNYPFLGVYYHKNNKSWMESEFRVYSSANNCTFEYVSQPFLMDLEGKQGNFKNLSEFVFKNIDGYFKIYSKHTPINLVRDLPQGFSALEPLVDLPIGINITRFQTLLALHRSYLTPGDSSSGWTAGAAAYYVGYLQPRTFLLKYNENGTITDAVDCALDPLSETKCTLKSFTVEKGIYQTSNFRVQPTESIVRFPNITNLCPFGEVFNATRFASVYAWNRKRISNCVADYSVLYNSASFSTFKCYGVSPTKLNDLCFTNVYADSFVIRGDEVRQIAPGQTGTIADYNYKLPDDFTGCVIAWNSNNLDSKVGGNYNYLYRLFRKSNLKPFERDISTEIYQAGSTPCNGVKGFNCYFPLQSYGFQPTYGVGYQPYRVVVLSFELLHAPATVCGPKKSTNLVKNKCVNFNFNGLTGTGVLTESNKKFLPFQQFGRDIADTTDAVRDPQTLEILDITPCSFGGVSVITPGTNTSNQVAVLYQGVNCTEVPVAIHADQLTPTWRVYSTGSNVFQTRAGCLIGAEYVNNSYECDIPIGAGICASYQTQTNSPQQAQSVASQSIIAYTMSLGAENSVAYSNNSIAIPTNFTISVTTEILPVSMTKTSVDCTMYICGDSTECSNLLLQYGSFCTQLNRALTGIAVEQDKNTQEVFAQVKQIYKTPPIKDFGGFNFSQILPDPSKPSKRSFIEDLLFNKVTLADAGFIKQYGDCLGDIAARDLICAQKFNGLTVLPPLLTDEMIAQYTSALLAGTITSGWTFGAGAALQIPFAMQMAYRFNGIGVTQNVLYENQKLIANQFNSAIGKIQDSLSSTASALGKLQDVVNQNAQALNTLVKQLSSNFGAISSVLNDILSRLDPPEAEVQIDRLITGRLQSLQTYVTQQLIRAAEIRASANLAAIKMSECVLGQSKRVDFCGKGYHLMSFPQSAPHGVVFLHVTYVPAQEKNFTTAPAICHDGKAHFPREGVFVSNGTHWFVTQRNFYEPQIITTDNTFVSGNCDVVIGIVNNTVYDPLQPELDSFKEELDKYFKNHTSPDVDLGDISGINASFVNIQKEIDRLNEVAKNLNESLIDLQELGKYEQYIKWPWYIWLGFIAGLIAIVMVTIMLCCMTSCCSCLKGCCSCGSCCKFDEDDSEPVLKGVKLHYT

SEQ ID NO: 152 - protein, 1273 aa, Artificial Sequence
  modified coronavirus S polypeptide
MFVFLVLLPLVSIQCVNLTTRTQLPPAYTNSFTRGVYYPDKVFRSSVLHSTQDLFLPFFSNVTWFHAIHVSGTNGTKRFDNPVLPFNDGVYFASTEKSNIIRGWIFGTTLDSKTQSLLIVNNATNVVIKVCEFQFCNDPFLGVYYHKNNKSCMESEFRVYSSANNCTFEYVSQPFLMDLEGKQGNFKNLREFVFKNIDGYFKIYSKHTPINLVRDLPQGFSALEPLVDLPIGINITRFQTLLALHRSYLTPGDSSSGWTAGAAAYYVGYLQPRTFLLKYNENGTITDAVDCALDPLSETKCTLKSFTVEKGIYQTSNFRVQPTESIVRFPNITNLCPFGEVFNATRFASVYAWNRKRISNCVADYSVLYNSASFSTFKCYGVSPTKLNDLCFTNVYADSFVIRGDEVRQIAPGQTGKIADYNYKLPDDFTGCVIAWNSNNLDSKVGGNYNYRYRLFRKSNLKPFERDISTEIYQAGSTPCNGVEGFNCYFPLQPYGFQPTNGVGYQPYRVVVLSFELLHAPATVCGPKKSTNLVKNKCVNFNFNGLTGTGVLTESNKKFLPFQQFGRDIADTTDAVRDPQTLEILDITPCSFGGVSVITPGTNTSNQVAVLYQGVNCTEVPVAIHADQLTPTWRVYSTGSNVFQTRAGCLIGAEHVNNSYECDIPIGAGICASYQTQTNSPQQAQSVASQSIIAYTMSLGAENSVAYSNNSIAIPTNFTISVTTEILPVSMTKTSVDCTMYICGDSTECSNLLLQYGSFCTQLNRALTGIAVEQDKNTQEVFAQVKQIYKTPPIKDFGGFNFSQILPDPSKPSKRSFIEDLLFNKVTLADAGFIKQYGDCLGDIAARDLICAQKFNGLTVLPPLLTDEMIAQYTSALLAGTITSGWTFGAGAALQIPFAMQMAYRFNGIGVTQNVLYENQKLIANQFNSAIGKIQDSLSSTASALGKLQDVVNQNAQALNTLVKQLSSNFGAISSVLNDILSRLDPPEAEVQIDRLITGRLQSLQTYVTQQLIRAAEIRASANLAATKMSECVLGQSKRVDFCGKGYHLMSFPQSAPHGVVFLHVTYVPAQEKNFTTAPAICHDGKAHFPREGVFVSNGTHWFVTQRNFYEPQIITTDNTFVSGNCDVVIGIVNNTVYDPLQPELDSFKEELDKYFKNHTSPDVDLGDISGINASVVNIQKEIDRLNEVAKNLNESLIDLQELGKYEQYIKWPWYIWLGFIAGLIAIVMVTIMLCCMTSCCSCLKGCCSCGSCCKFDEDDSEPVLKGVKLHYT

SEQ ID NO: 153 - protein, 1260 aa, Artificial Sequence
  modified coronavirus S polypeptide
QCVNLTTRTQLPPAYTNSFTRGVYYPDKVFRSSVLHSTQDLFLPFFSNVTWFHAIHVSGTNGTKRFDNPVLPFNDGVYFASTEKSNIIRGWIFGTTLDSKTQSLLIVNNATNVVIKVCEFQFCNDPFLGVYYHKNNKSCMESEFRVYSSANNCTFEYVSQPFLMDLEGKQGNFKNLREFVFKNIDGYFKIYSKHTPINLVRDLPQGFSALEPLVDLPIGINITRFQTLLALHRSYLTPGDSSSGWTAGAAAYYVGYLQPRTFLLKYNENGTITDAVDCALDPLSETKCTLKSFTVEKGIYQTSNFRVQPTESIVRFPNITNLCPFGEVFNATRFASVYAWNRKRISNCVADYSVLYNSASFSTFKCYGVSPTKLNDLCFTNVYADSFVIRGDEVRQIAPGQTGKIADYNYKLPDDFTGCVIAWNSNNLDSKVGGNYNYRYRLFRKSNLKPFERDISTEIYQAGSTPCNGVEGFNCYFPLQPYGFQPTNGVGYQPYRVVVLSFELLHAPATVCGPKKSTNLVKNKCVNFNFNGLTGTGVLTESNKKFLPFQQFGRDIADTTDAVRDPQTLEILDITPCSFGGVSVITPGTNTSNQVAVLYQGVNCTEVPVAIHADQLTPTWRVYSTGSNVFQTRAGCLIGAEHVNNSYECDIPIGAGICASYQTQTNSPQQAQSVASQSIIAYTMSLGAENSVAYSNNSIAIPTNFTISVTTEILPVSMTKTSVDCTMYICGDSTECSNLLLQYGSFCTQLNRALTGIAVEQDKNTQEVFAQVKQIYKTPPIKDFGGFNFSQILPDPSKPSKRSFIEDLLFNKVTLADAGFIKQYGDCLGDIAARDLICAQKFNGLTVLPPLLTDEMIAQYTSALLAGTITSGWTFGAGAALQIPFAMQMAYRFNGIGVTQNVLYENQKLIANQFNSAIGKIQDSLSSTASALGKLQDVVNQNAQALNTLVKQLSSNFGAISSVLNDILSRLDPPEAEVQIDRLITGRLQSLQTYVTQQLIRAAEIRASANLAATKMSECVLGQSKRVDFCGKGYHLMSFPQSAPHGVVFLHVTYVPAQEKNFTTAPAICHDGKAHFPREGVFVSNGTHWFVTQRNFYEPQIITTDNTFVSGNCDVVIGIVNNTVYDPLQPELDSFKEELDKYFKNHTSPDVDLGDISGINASVVNIQKEIDRLNEVAKNLNESLIDLQELGKYEQYIKWPWYIWLGFIAGLIAIVMVTIMLCCMTSCCSCLKGCCSCGSCCKFDEDDSEPVLKGVKLHYT

SEQ ID NO: 154 - protein, 13 aa, Artificial Sequence
  N-terminal signal peptide
MFVFFVLLPLVSS

SEQ ID NO: 155 - protein, 1273 aa, Artificial Sequence
  modified coronavirus S polypeptide
MFVFFVLLPLVSSQCVNLTTRTQLPPAYTNSFTRGVYYPDKVFRSSVLHSTQDLFLPFFSNVTWFHAIHVSGTNGTKRFDNPVLPFNDGVYFASIEKSNIIRGWIFGTTLDSKTQSLLIVNNATNVVIKVCEFQFCNDPFLGVYYHKNNKSWMESEFRVYSSANNCTFEYVSQPFLMDLEGKQGNFKNLREFVFKNIDGYFKIYSKHTPINLVRDLPQGFSALEPLVDLPIGINITRFQTLLALHRSYLTPGGSSSGWTAGAAAYYVGYLQPRTFLLKYNENGTITDAVDCALDPLSETKCTLKSFTVEKGIYQTSNFRVQPTESIVRFPNITNLCPFGEVFNATRFASVYAWNRKRISNCVADYSVLYNSASFSTFKCYGVSPTKLNDLCFTNVYADSFVIRGDEVRQIAPGQTGKIADYNYKLPDDFTGCVIAWNSNNLDSKVGGNYNYLYRLFRKSNLKPFERDISTEIYQAGSTPCNGVKGFNCYFPLQSYGFQPTNGVGYQPYRVVVLSFELLHAPATVCGPKKSTNLVKNKCVNFNFNGLTGTGVLTESNKKFLPFQQFGRDIADTTDAVRDPQTLEILDITPCSFGGVSVITPGTNTSNQVAVLYQGVNCTEVPVAIHADQLTPTWRVYSTGSNVFQTRAGCLIGAEHVNNSYECDIPIGAGICASYQTQTNSPQQAQSVASQSIIAYTMSLGVENSVAYSNNSIAIPTNFTISVTTEILPVSMTKTSVDCTMYICGDSTECSNLLLQYGSFCTQLNRALTGIAVEQDKNTQEVFAQVKQIYKTPPIKDFGGFNFSQILPDPSKPSKRSFIEDLLFNKVTLADAGFIKQYGDCLGDIAARDLICAQKFNGLTVLPPLLTDEMIAQYTSALLAGTITSGWTFGAGAALQIPFAMQMAYRFNGIGVTQNVLYENQKLIANQFNSAIGKIQDSLSSTASALGKLQDVVNQNAQALNTLVKQLSSNFGAISSVLNDILSRLDPPEAEVQIDRLITGRLQSLQTYVTQQLIRAAEIRASANLAATKMSECVLGQSKRVDFCGKGYHLMSFPQSAPHGVVFLHVTYVPAQEKNFTTAPAICHDGKAHFPREGVFVSNGTHWFVTQRNFYEPQIITTDNTFVSGNCDVVIGIVNNTVYDPLQPELDSFKEELDKYFKNHTSPDVDLGDISGINASVVNIQKEIDRLNEVAKNLNESLIDLQELGKYEQYIKWPWYIWLGFIAGLIAIVMVTIMLCCMTSCCSCLKGCCSCGSCCKFDEDDSEPVLKGVKLHYT

SEQ ID NO: 156 - protein, 1260 aa, Artificial Sequence
  modified coronavirus S polypeptide
QCVNLTTRTQLPPAYTNSFTRGVYYPDKVFRSSVLHSTQDLFLPFFSNVTWFHAIHVSGTNGTKRFDNPVLPFNDGVYFASIEKSNIIRGWIFGTTLDSKTQSLLIVNNATNVVIKVCEFQFCNDPFLGVYYHKNNKSWMESEFRVYSSANNCTFEYVSQPFLMDLEGKQGNFKNLREFVFKNIDGYFKIYSKHTPINLVRDLPQGFSALEPLVDLPIGINITRFQTLLALHRSYLTPGGSSSGWTAGAAAYYVGYLQPRTFLLKYNENGTITDAVDCALDPLSETKCTLKSFTVEKGIYQTSNFRVQPTESIVRFPNITNLCPFGEVFNATRFASVYAWNRKRISNCVADYSVLYNSASFSTFKCYGVSPTKLNDLCFTNVYADSFVIRGDEVRQIAPGQTGKIADYNYKLPDDFTGCVIAWNSNNLDSKVGGNYNYLYRLFRKSNLKPFERDISTEIYQAGSTPCNGVKGFNCYFPLQSYGFQPTNGVGYQPYRVVVLSFELLHAPATVCGPKKSTNLVKNKCVNFNFNGLTGTGVLTESNKKFLPFQQFGRDIADTTDAVRDPQTLEILDITPCSFGGVSVITPGTNTSNQVAVLYQGVNCTEVPVAIHADQLTPTWRVYSTGSNVFQTRAGCLIGAEHVNNSYECDIPIGAGICASYQTQTNSPQQAQSVASQSIIAYTMSLGVENSVAYSNNSIAIPTNFTISVTTEILPVSMTKTSVDCTMYICGDSTECSNLLLQYGSFCTQLNRALTGIAVEQDKNTQEVFAQVKQIYKTPPIKDFGGFNFSQILPDPSKPSKRSFIEDLLFNKVTLADAGFIKQYGDCLGDIAARDLICAQKFNGLTVLPPLLTDEMIAQYTSALLAGTITSGWTFGAGAALQIPFAMQMAYRFNGIGVTQNVLYENQKLIANQFNSAIGKIQDSLSSTASALGKLQDVVNQNAQALNTLVKQLSSNFGAISSVLNDILSRLDPPEAEVQIDRLITGRLQSLQTYVTQQLIRAAEIRASANLAATKMSECVLGQSKRVDFCGKGYHLMSFPQSAPHGVVFLHVTYVPAQEKNFTTAPAICHDGKAHFPREGVFVSNGTHWFVTQRNFYEPQIITTDNTFVSGNCDVVIGIVNNTVYDPLQPELDSFKEELDKYFKNHTSPDVDLGDISGINASVVNIQKEIDRLNEVAKNLNESLIDLQELGKYEQYIKWPWYIWLGFIAGLIAIVMVTIMLCCMTSCCSCLKGCCSCGSCCKFDEDDSEPVLKGVKLHYT

SEQ ID NO: 157 - protein, 1273 aa, Artificial Sequence
  modified coronavirus S polypeptide
MFVFFVLLPLVSSQCVNLTTRTQLPPAYTNSFTRGVYYPDKVFRSSVLHSTQDLFLPFFSNVTWFHAIHVSGTNGTKRFDNPVLPFNDGVYFASIEKSNIIRGWIFGTTLDSKTQSLLIVNNATNVVIKVCEFQFCNDPFLGVYYHKNNKSWMESEFRVYSSANNCTFEYVSQPFLMDLEGKQGNFKNLREFVFKNIDGYFKIYSKHTPINLVRDLPQGFSALEPLVDLPIGINITRFQTLLALHRSYLTPGGSSSGWTAGAAAYYVGYLQPRTFLLKYNENGTITDAVDCALDPLSETKCTLKSFTVEKGIYQTSNFRVQPTESIVRFPNITNLCPFGEVFNATRFASVYAWNRKRISNCVADYSVLYNSASFSTFKCYGVSPTKLNDLCFTNVYADSFVIRGDEVRQIAPGQTGKIADYNYKLPDDFTGCVIAWNSNNLDSKVGGNYNYLYRLFRKSNLKPFERDISTEIYQAGNTPCNGVEGFNCYFPLQSYGFQPTNGVGYQPYRVVVLSFELLHAPATVCGPKKSTNLVKNKCVNFNFNGLTGTGVLTESNKKFLPFQQFGRDIADTTDAVRDPQTLEILDITPCSFGGVSVITPGTNTSNQVAVLYQGVNCTEVPVAIHADQLTPTWRVYSTGSNVFQTRAGCLIGAEHVNNSYECDIPIGAGICASYQTQTNSPQQAQSVASQSIIAYTMSLGVENSVAYSNNSIAIPTNFTISVTTEILPVSMTKTSVDCTMYICGDSTECSNLLLQYGSFCTQLNRALTGIAVEQDKNTQEVFAQVKQIYKTPPIKDFGGFNFSQILPDPSKPSKRSFIEDLLFNKVTLADAGFIKQYGDCLGDIAARDLICAQKFNGLTVLPPLLTDEMIAQYTSALLAGTITSGWTFGAGAALQIPFAMQMAYRFNGIGVTQNVLYENQKLIANQFNSAIGKIQDSLSSTASALGKLQDVVNQNAQALNTLVKQLSSNFGAISSVLNDILSRLDPPEAEVQIDRLITGRLQSLQTYVTQQLIRAAEIRASANLAATKMSECVLGQSKRVDFCGKGYHLMSFPQSAPHGVVFLHVTYVPAQEKNFTTAPAICHDGKAHFPREGVFVSNGTHWFVTQRNFYEPQIITTDNTFVSGNCDVVIGIVNNTVYDPLQPELDSFKEELDKYFKNHTSPDVDLGDISGINASVVNIQKEIDRLNEVAKNLNESLIDLQELGKYEQYIKWPWYIWLGFIAGLIAIVMVTIMLCCMTSCCSCLKGCCSCGSCCKFDEDDSEPVLKGVKLHYT

SEQ ID NO: 158 - protein, 1260 aa, Artificial Sequence
  modified coronavirus S polypeptide
QCVNLTTRTQLPPAYTNSFTRGVYYPDKVFRSSVLHSTQDLFLPFFSNVTWFHAIHVSGTNGTKRFDNPVLPFNDGVYFASIEKSNIIRGWIFGTTLDSKTQSLLIVNNATNVVIKVCEFQFCNDPFLGVYYHKNNKSWMESEFRVYSSANNCTFEYVSQPFLMDLEGKQGNFKNLREFVFKNIDGYFKIYSKHTPINLVRDLPQGFSALEPLVDLPIGINITRFQTLLALHRSYLTPGGSSSGWTAGAAAYYVGYLQPRTFLLKYNENGTITDAVDCALDPLSETKCTLKSFTVEKGIYQTSNFRVQPTESIVRFPNITNLCPFGEVFNATRFASVYAWNRKRISNCVADYSVLYNSASFSTFKCYGVSPTKLNDLCFTNVYADSFVIRGDEVRQIAPGQTGKIADYNYKLPDDFTGCVIAWNSNNLDSKVGGNYNYLYRLFRKSNLKPFERDISTEIYQAGNTPCNGVEGFNCYFPLQSYGFQPTNGVGYQPYRVVVLSFELLHAPATVCGPKKSTNLVKNKCVNFNFNGLTGTGVLTESNKKFLPFQQFGRDIADTTDAVRDPQTLEILDITPCSFGGVSVITPGTNTSNQVAVLYQGVNCTEVPVAIHADQLTPTWRVYSTGSNVFQTRAGCLIGAEHVNNSYECDIPIGAGICASYQTQTNSPQQAQSVASQSIIAYTMSLGVENSVAYSNNSIAIPTNFTISVTTEILPVSMTKTSVDCTMYICGDSTECSNLLLQYGSFCTQLNRALTGIAVEQDKNTQEVFAQVKQIYKTPPIKDFGGFNFSQILPDPSKPSKRSFIEDLLFNKVTLADAGFIKQYGDCLGDIAARDLICAQKFNGLTVLPPLLTDEMIAQYTSALLAGTITSGWTFGAGAALQIPFAMQMAYRFNGIGVTQNVLYENQKLIANQFNSAIGKIQDSLSSTASALGKLQDVVNQNAQALNTLVKQLSSNFGAISSVLNDILSRLDPPEAEVQIDRLITGRLQSLQTYVTQQLIRAAEIRASANLAATKMSECVLGQSKRVDFCGKGYHLMSFPQSAPHGVVFLHVTYVPAQEKNFTTAPAICHDGKAHFPREGVFVSNGTHWFVTQRNFYEPQIITTDNTFVSGNCDVVIGIVNNTVYDPLQPELDSFKEELDKYFKNHTSPDVDLGDISGINASVVNIQKEIDRLNEVAKNLNESLIDLQELGKYEQYIKWPWYIWLGFIAGLIAIVMVTIMLCCMTSCCSCLKGCCSCGSCCKFDEDDSEPVLKGVKLHYT

SEQ ID NO: 159 - protein, 1271 aa, Artificial Sequence
  Recombinant SARS-CoV-2 S Polypeptide
MFVFLVLLPLVSSQCVNLRTRTQLPPAYTNSFTRGVYYPDKVFRSSVLHSTQDLFLPFFSNVTWFHAIHVSGTNGTKRFDNPVLPFNDGVYFASTEKSNIIRGWIFGTTLDSKTQSLLIVNNATNVVIKVCEFQFCNDPFLDVYYHKNNKSWMESGVYSSANNCTFEYVSQPFLMDLEGKQGNFKNLREFVFKNIDGYFKIYSKHTPINLVRDLPQGFSALEPLVDLPIGINITRFQTLLALHRSYLTPGDSSSGWTAGAAAYYVGYLQPRTFLLKYNENGTITDAVDCALDPLSETKCTLKSFTVEKGIYQTSNFRVQPTESIVRFPNITNLCPFGEVFNATRFASVYAWNRKRISNCVADYSVLYNSASFSTFKCYGVSPTKLNDLCFTNVYADSFVIRGDEVRQIAPGQTGKIADYNYKLPDDFTGCVIAWNSNNLDSKVGGNYNYRYRLFRKSNLKPFERDISTEIYQAGSKPCNGVEGFNCYFPLQSYGFQPTNGVGYQPYRVVVLSFELLHAPATVCGPKKSTNLVKNKCVNFNFNGLTGTGVLTESNKKFLPFQQFGRDIADTTDAVRDPQTLEILDITPCSFGGVSVITPGTNTSNQVAVLYQGVNCTEVPVAIHADQLTPTWRVYSTGSNVFQTRAGCLIGAEHVNNSYECDIPIGAGICASYQTQTNSRQQAQSVASQSIIAYTMSLGAENSVAYSNNSIAIPTNFTISVTTEILPVSMTKTSVDCTMYICGDSTECSNLLLQYGSFCTQLNRALTGIAVEQDKNTQEVFAQVKQIYKTPPIKDFGGFNFSQILPDPSKPSKRSFIEDLLFNKVTLADAGFIKQYGDCLGDIAARDLICAQKFNGLTVLPPLLTDEMIAQYTSALLAGTITSGWTFGAGAALQIPFAMQMAYRFNGIGVTQNVLYENQKLIANQFNSAIGKIQDSLSSTASALGKLQNVVNQNAQALNTLVKQLSSNFGAISSVLNDILSRLDPPEAEVQIDRLITGRLQSLQTYVTQQLIRAAEIRASANLAATKMSECVLGQSKRVDFCGKGYHLMSFPQSAPHGVVFLHVTYVPAQEKNFTTAPAICHDGKAHFPREGVFVSNGTHWFVTQRNFYEPQIITTDNTFVSGNCDVVIGIVNNTVYDPLQPELDSFKEELDKYFKNHTSPDVDLGDISGINASVVNIQKEIDRLNEVAKNLNESLIDLQELGKYEQYIKWPWYIWLGFIAGLIAIVMVTIMLCCMTSCCSCLKGCCSCGSCCKFDEDDSEPVLKGVKLHYT

SEQ ID NO: 160 - protein, 1273 aa, Artificial Sequence
  Recombinant SARS-CoV-2 S Polypeptide
MFVFLVLLPLVSSQCVNLTTRTQLPPAYTNSFTRGVYYPDKVFRSSVLHSTQDLFLPFFSNVTWFHAIHVSGTNGTKRFDNPVLPFNDGVYFASIEKSNIIRGWIFGTTLDSKTQSLLIVNNATNVVIKVCEFQFCNDPFLDVYYHKNNKSWMKSEFRVYSSANNCTFEYVSQPFLMDLEGKQGNFKNLREFVFKNIDGYFKIYSKHTPINLVRDLPQGFSALEPLVDLPIGINITRFQTLLALHRSYLTPGDSSSGWTAGAAAYYVGYLQPRTFLLKYNENGTITDAVDCALDPLSETKCTLKSFTVEKGIYQTSNFRVQPTESIVRFPNITNLCPFGEVFNATRFASVYAWNRKRISNCVADYSVLYNSASFSTFKCYGVSPTKLNDLCFTNVYADSFVIRGDEVRQIAPGQTGKIADYNYKLPDDFTGCVIAWNSNNLDSKVGGNYNYRYRLFRKSNLKPFERDISTEIYQAGSTPCNGVQGFNCYFPLQSYGFQPTNGVGYQPYRVVVLSFELLHAPATVCGPKKSTNLVKNKCVNFNFNGLTGTGVLTESNKKFLPFQQFGRDIADTTDAVRDPQTLEILDITPCSFGGVSVITPGTNTSNQVAVLYQGVNCTEVPVAIHADQLTPTWRVYSTGSNVFQTRAGCLIGAEHVNNSYECDIPIGAGICASYQTQTNSRQQAQSVASQSIIAYTMSLGAENSVAYSNNSIAIPTNFTISVTTEILPVSMTKTSVDCTMYICGDSTECSNLLLQYGSFCTQLNRALTGIAVEQDKNTQEVFAQVKQIYKTPPIKDFGGFNFSQILPDPSKPSKRSFIEDLLFNKVTLADAGFIKQYGDCLGDIAARDLICAQKFNGLTVLPPLLTDEMIAQYTSALLAGTITSGWTFGAGAALQIPFAMQMAYRFNGIGVTQNVLYENQKLIANQFNSAIGKIQDSLSSTASALGKLQDVVNQNAQALNTLVKQLSSNFGAISSVLNDILSRLDPPEAEVQIDRLITGRLQSLQTYVTQQLIRAAEIRASANLAATKMSECVLGQSKRVDFCGKGYHLMSFPQSAPHGVVFLHVTYVPAHEKNFTTAPAICHDGKAHFPREGVFVSNGTHWFVTQRNFYEPQIITTDNTFVSGNCDVVIGIVNNTVYDPLQPELDSFKEELDKYFKNHTSPDVDLGDISGINASVVNIQKEIDRLNEVAKNLNESLIDLQELGKYEQYIKWPWYIWLGFIAGLIAIVMVTIMLCCMTSCCSCLKGCCSCGSCCKFDEDDSEPVLKGVKLHYT

SEQ ID NO: 161 - protein, 1271 aa, Artificial Sequence
  Recombinant SARS-CoV-2 S Polypeptide
MFVFLVLLPLVSSQCVNLRTRTQLPPAYTNSFTRGVYYPDKVFRSSVLHSTQDLFLPFFSNVTWFHAIHVSGTNGTKRFDNPVLPFNDGVYFASTEKSNIIRGWIFGTTLDSKTQSLLIVNNATNVVIKVCEFQFCNDPFLDVYYHKNNKSWMESGVYSSANNCTFEYVSQPFLMDLEGKQGNFKNLREFVFKNIDGYFKIYSKHTPINLVRDLPQGFSALEPLVDLPIGINITRFQTLLALHRSYLTPGDSSSGITAGAAAYYVGYLQPRTFLLKYNENGTITDAVDCALDPLSETKCTLKSFTVEKGIYQTSNFRVQPTESIVRFPNITNLCPFGEVFNATRFASVYAWNRKRISNCVADYSVLYNSASFSTFKCYGVSPTKLNDLCFTNVYADSFVIRGDEVRQIAPGQTGNIADYNYKLPDDFTGCVIAWNSNNLDSKVGGNYNYRYRLFRKSNLKPFERDISTEIYQAGSKPCNGVEGFNCYFPLQSYGFQPTNGVGYQPYRVVVLSFELLHAPATVCGPKKSTNLVKNKCVNFNFNGLTGTGVLTESNKKFLPFQQFGRDIADTTDAVRDPQTLEILDITPCSFGGVSVITPGTNTSNQVAVLYQGVNCTEVPVAIHADQLTPTWRVYSTGSNVFQTRAGCLIGAEHVNNSYECDIPIGAGICASYQTQTNSRQQAQSVASQSIIAYTMSLGAENSVAYSNNSIAIPTNFTISVTTEILPVSMTKTSVDCTMYICGDSTECSNLLLQYGSFCTQLNRALTGIAVEQDKNTQEVFAQVKQIYKTPPIKDFGGFNFSQILPDPSKPSKRSFIEDLLFNKVTLADAGFIKQYGDCLGDIAARDLICAQKFNGLTVLPPLLTDEMIAQYTSALLAGTITSGWTFGAGAALQIPFAMQMAYRFNGIGVTQNVLYENQKLIANQFNSAIGKIQDSLSSTASALGKLQNVVNQNAQALNTLVKQLSSNFGAISSVLNDILSRLDPPEAEVQIDRLITGRLQSLQTYVTQQLIRAAEIRASANLAATKMSECVLGQSKRVDFCGKGYHLMSFPQSAPHGVVFLHVTYVPAQEKNFTTAPAICHDGKAHFPREGVFVSNGTHWFVTQRNFYEPQIITTDNTFVSGNCDVVIGIVNNTVYDPLQPELDSFKEELDKYFKNHTSPDVDLGDISGINASVVNIQKEIDRLNEVAKNLNESLIDLQELGKYEQYIKWPWYIWLGFIAGLIAIVMVTIMLCCMTSCCSCLKGCCSCGSCCKFDEDDSEPVLKGVKLHYT

SEQ ID NO: 162 - protein, 1273 aa, Artificial Sequence
  Recombinant SARS-CoV-2 S Polypeptide
MFVFLVLLPLVSSQCVNLTTRTQLPPAYTNSFTRGVYYPDKVFRSSVLHSTQDLFLPFFSNVTWFHAIHVSGTNGTKRFDNPVLPFNDGVYFASIEKSNIIRGWIFGTTLDSKTQSLLIVNNATNVVIKVCEFQFCNDPFLGVSNHKNNKSWMESEFRVYSSANNCTFEYVSQPFLMDLEGKQGNFKNLREFVFKNIDGYFKIYSKHTPINLVRDLPQGFSALEPLVDLPIGINITRFQTLLALHRSYLTPGDSSSGWTAGAAAYYVGYLQPRTFLLKYNENGTITDAVDCALDPLSETKCTLKSFTVEKGIYQTSNFRVQPTESIVRFPNITNLCPFGEVFNATKFASVYAWNRKRISNCVADYSVLYNSASFSTFKCYGVSPTKLNDLCFTNVYADSFVIRGDEVRQIAPGQTGKIADYNYKLPDDFTGCVIAWNSNNLDSKVGGNYNYLYRLFRKSNLKPFERDISTEIYQAGSTPCNGVKGFNCYFPLQSYGFQPTYGVGYQPYRVVVLSFELLHAPATVCGPKKSTNLVKNKCVNFNFNGLTGTGVLTESNKKFLPFQQFGRDIADTTDAVRDPQTLEILDITPCSFGGVSVITPGTNTSNQVAVLYQGVNCTEVPVAIHADQLTPTWRVYSTGSNVFQTRAGCLIGAEHVNNSYECDIPIGAGICASYQTQTNSHQQAQSVASQSIIAYTMSLGAENSVAYSNNSIAIPTNFTISVTTEILPVSMTKTSVDCTMYICGDSTECSNLLLQYGSFCTQLNRALTGIAVEQDKNTQEVFAQVKQIYKTPPIKDFGGFNFSQILPDPSKPSKRSFIEDLLFNKVTLADAGFIKQYGDCLGDIAARDLICAQKFNGLTVLPPLLTDEMIAQYTSALLAGTITSGWTFGAGAALQIPFAMQMAYRFNGIGVTQNVLYENQKLIANQFNSAIGKIQDSLSSTASALGKLQNVVNQNAQALNTLVKQLSSNFGAISSVLNDILSRLDPPEAEVQIDRLITGRLQSLQTYVTQQLIRAAEIRASANLAATKMSECVLGQSKRVDFCGKGYHLMSFPQSAPHGVVFLHVTYVPAQEKNFTTAPAICHDGKAHFPREGVFVSNGTHWFVTQRNFYEPQIITTDNTFVSGNCDVVIGIVNNTVYDPLQPELDSFKEELDKYFKNHTSPDVDLGDISGINASVVNIQKEIDRLNEVAKNLNESLIDLQELGKYEQYIKWPWYIWLGFIAGLIAIVMVTIMLCCMTSCCSCLKGCCSCGSCCKFDEDDSEPVLKGVKLHYT

SEQ ID NO: 163 - protein, 1274 aa, Artificial Sequence
  Recombinant SARS-CoV-2 S Polypeptide
MFVFLVLLPLVSSQCVNLTTRTQLPPAYTNSFTRGVYYPDKVFRSSVLHSTQDLFLPFFSNVTWFHAIHVSGTNGTKRFDNPVLPFNDGVYFASIEKSNIIRGWIFGTTLDSKTQSLLIVNNATNVVIKVCEFQFCNDPFLGVTSNHKNNKSWMESEFRVYSSANNCTFEYVSQPFLMDLEGKQGNFKNLREFVFKNIDGYFKIYSKHTPINLVRDLPQGFSALEPLVDLPIGINITRFQTLLALHRSYLTPGDSSSGWTAGAAAYYVGYLQPRTFLLKYNENGTITDAVDCALDPLSETKCTLKSFTVEKGIYQTSNFRVQPTESIVRFPNITNLCPFGEVFNATKFASVYAWNRKRISNCVADYSVLYNSASFSTFKCYGVSPTKLNDLCFTNVYADSFVIRGDEVRQIAPGQTGKIADYNYKLPDDFTGCVIAWNSNNLDSKVGGNYNYLYRLFRKSNLKPFERDISTEIYQAGSTPCNGVKGFNCYFPLQSYGFQPTYGVGYQPYRVVVLSFELLHAPATVCGPKKSTNLVKNKCVNFNFNGLTGTGVLTESNKKFLPFQQFGRDIADTTDAVRDPQTLEILDITPCSFGGVSVITPGTNTSNQVAVLYQGVNCTEVPVAIHADQLTPTWRVYSTGSNVFQTRAGCLIGAEHVNNSYECDIPIGAGICASYQTQTNSHQQAQSVASQSIIAYTMSLGAENSVAYSNNSIAIPTNFTISVTTEILPVSMTKTSVDCTMYICGDSTECSNLLLQYGSFCTQLNRALTGIAVEQDKNTQEVFAQVKQIYKTPPIKDFGGFNFSQILPDPSKPSKRSFIEDLLFNKVTLADAGFIKQYGDCLGDIAARDLICAQKFNGLTVLPPLLTDEMIAQYTSALLAGTITSGWTFGAGAALQIPFAMQMAYRFNGIGVTQNVLYENQKLIANQFNSAIGKIQDSLSSTASALGKLQNVVNQNAQALNTLVKQLSSNFGAISSVLNDILSRLDPPEAEVQIDRLITGRLQSLQTYVTQQLIRAAEIRASANLAATKMSECVLGQSKRVDFCGKGYHLMSFPQSAPHGVVFLHVTYVPAQEKNFTTAPAICHDGKAHFPREGVFVSNGTHWFVTQRNFYEPQIITTDNTFVSGNCDVVIGIVNNTVYDPLQPELDSFKEELDKYFKNHTSPDVDLGDISGINASVVNIQKEIDRLNEVAKNLNESLIDLQELGKYEQYIKWPWYIWLGFIAGLIAIVMVTIMLCCMTSCCSCLKGCCSCGSCCKFDEDDSEPVLKGVKLHYT

SEQ ID NO: 164 - protein, 1258 aa, Artificial Sequence
  Recombinant SARS-CoV-2 S Polypeptide
QCVNLRTRTQLPPAYTNSFTRGVYYPDKVFRSSVLHSTQDLFLPFFSNVTWFHAIHVSGTNGTKRFDNPVLPFNDGVYFASTEKSNIIRGWIFGTTLDSKTQSLLIVNNATNVVIKVCEFQFCNDPFLDVYYHKNNKSWMESGVYSSANNCTFEYVSQPFLMDLEGKQGNFKNLREFVFKNIDGYFKIYSKHTPINLVRDLPQGFSALEPLVDLPIGINITRFQTLLALHRSYLTPGDSSSGWTAGAAAYYVGYLQPRTFLLKYNENGTITDAVDCALDPLSETKCTLKSFTVEKGIYQTSNFRVQPTESIVRFPNITNLCPFGEVFNATRFASVYAWNRKRISNCVADYSVLYNSASFSTFKCYGVSPTKLNDLCFTNVYADSFVIRGDEVRQIAPGQTGKIADYNYKLPDDFTGCVIAWNSNNLDSKVGGNYNYRYRLFRKSNLKPFERDISTEIYQAGSKPCNGVEGFNCYFPLQSYGFQPTNGVGYQPYRVVVLSFELLHAPATVCGPKKSTNLVKNKCVNFNFNGLTGTGVLTESNKKFLPFQQFGRDIADTTDAVRDPQTLEILDITPCSFGGVSVITPGTNTSNQVAVLYQGVNCTEVPVAIHADQLTPTWRVYSTGSNVFQTRAGCLIGAEHVNNSYECDIPIGAGICASYQTQTNSRQQAQSVASQSIIAYTMSLGAENSVAYSNNSIAIPTNFTISVTTEILPVSMTKTSVDCTMYICGDSTECSNLLLQYGSFCTQLNRALTGIAVEQDKNTQEVFAQVKQIYKTPPIKDFGGFNFSQILPDPSKPSKRSFIEDLLFNKVTLADAGFIKQYGDCLGDIAARDLICAQKFNGLTVLPPLLTDEMIAQYTSALLAGTITSGWTFGAGAALQIPFAMQMAYRFNGIGVTQNVLYENQKLIANQFNSAIGKIQDSLSSTASALGKLQNVVNQNAQALNTLVKQLSSNFGAISSVLNDILSRLDPPEAEVQIDRLITGRLQSLQTYVTQQLIRAAEIRASANLAATKMSECVLGQSKRVDFCGKGYHLMSFPQSAPHGVVFLHVTYVPAQEKNFTTAPAICHDGKAHFPREGVFVSNGTHWFVTQRNFYEPQIITTDNTFVSGNCDVVIGIVNNTVYDPLQPELDSFKEELDKYFKNHTSPDVDLGDISGINASVVNIQKEIDRLNEVAKNLNESLIDLQELGKYEQYIKWPWYIWLGFIAGLIAIVMVTIMLCCMTSCCSCLKGCCSCGSCCKFDEDDSEPVLKGVKLHYT

SEQ ID NO: 165 - protein, 1260 aa, Artificial Sequence
  Recombinant SARS-CoV-2 S Polypeptide
QCVNLTTRTQLPPAYTNSFTRGVYYPDKVFRSSVLHSTQDLFLPFFSNVTWFHAIHVSGTNGTKRFDNPVLPFNDGVYFASIEKSNIIRGWIFGTTLDSKTQSLLIVNNATNVVIKVCEFQFCNDPFLDVYYHKNNKSWMKSEFRVYSSANNCTFEYVSQPFLMDLEGKQGNFKNLREFVFKNIDGYFKIYSKHTPINLVRDLPQGFSALEPLVDLPIGINITRFQTLLALHRSYLTPGDSSSGWTAGAAAYYVGYLQPRTFLLKYNENGTITDAVDCALDPLSETKCTLKSFTVEKGIYQTSNFRVQPTESIVRFPNITNLCPFGEVFNATRFASVYAWNRKRISNCVADYSVLYNSASFSTFKCYGVSPTKLNDLCFTNVYADSFVIRGDEVRQIAPGQTGKIADYNYKLPDDFTGCVIAWNSNNLDSKVGGNYNYRYRLFRKSNLKPFERDISTEIYQAGSTPCNGVQGFNCYFPLQSYGFQPTNGVGYQPYRVVVLSFELLHAPATVCGPKKSTNLVKNKCVNFNFNGLTGTGVLTESNKKFLPFQQFGRDIADTTDAVRDPQTLEILDITPCSFGGVSVITPGTNTSNQVAVLYQGVNCTEVPVAIHADQLTPTWRVYSTGSNVFQTRAGCLIGAEHVNNSYECDIPIGAGICASYQTQTNSRQQAQSVASQSIIAYTMSLGAENSVAYSNNSIAIPTNFTISVTTEILPVSMTKTSVDCTMYICGDSTECSNLLLQYGSFCTQLNRALTGIAVEQDKNTQEVFAQVKQIYKTPPIKDFGGFNFSQILPDPSKPSKRSFIEDLLFNKVTLADAGFIKQYGDCLGDIAARDLICAQKFNGLTVLPPLLTDEMIAQYTSALLAGTITSGWTFGAGAALQIPFAMQMAYRFNGIGVTQNVLYENQKLIANQFNSAIGKIQDSLSSTASALGKLQDVVNQNAQALNTLVKQLSSNFGAISSVLNDILSRLDPPEAEVQIDRLITGRLQSLQTYVTQQLIRAAEIRASANLAATKMSECVLGQSKRVDFCGKGYHLMSFPQSAPHGVVFLHVTYVPAHEKNFTTAPAICHDGKAHFPREGVFVSNGTHWFVTQRNFYEPQIITTDNTFVSGNCDVVIGIVNNTVYDPLQPELDSFKEELDKYFKNHTSPDVDLGDISGINASVVNIQKEIDRLNEVAKNLNESLIDLQELGKYEQYIKWPWYIWLGFIAGLIAIVMVTIMLCCMTSCCSCLKGCCSCGSCCKFDEDDSEPVLKGVKLHYT

SEQ ID NO: 166 - protein, 1258 aa, Artificial Sequence
  Recombinant SARS-CoV-2 S Polypeptide
QCVNLRTRTQLPPAYTNSFTRGVYYPDKVFRSSVLHSTQDLFLPFFSNVTWFHAIHVSGTNGTKRFDNPVLPFNDGVYFASTEKSNIIRGWIFGTTLDSKTQSLLIVNNATNVVIKVCEFQFCNDPFLDVYYHKNNKSWMESGVYSSANNCTFEYVSQPFLMDLEGKQGNFKNLREFVFKNIDGYFKIYSKHTPINLVRDLPQGFSALEPLVDLPIGINITRFQTLLALHRSYLTPGDSSSGITAGAAAYYVGYLQPRTFLLKYNENGTITDAVDCALDPLSETKCTLKSFTVEKGIYQTSNFRVQPTESIVRFPNITNLCPFGEVFNATRFASVYAWNRKRISNCVADYSVLYNSASFSTFKCYGVSPTKLNDLCFTNVYADSFVIRGDEVRQIAPGQTGNIADYNYKLPDDFTGCVIAWNSNNLDSKVGGNYNYRYRLFRKSNLKPFERDISTEIYQAGSKPCNGVEGFNCYFPLQSYGFQPTNGVGYQPYRVVVLSFELLHAPATVCGPKKSTNLVKNKCVNFNFNGLTGTGVLTESNKKFLPFQQFGRDIADTTDAVRDPQTLEILDITPCSFGGVSVITPGTNTSNQVAVLYQGVNCTEVPVAIHADQLTPTWRVYSTGSNVFQTRAGCLIGAEHVNNSYECDIPIGAGICASYQTQTNSRQQAQSVASQSIIAYTMSLGAENSVAYSNNSIAIPTNFTISVTTEILPVSMTKTSVDCTMYICGDSTECSNLLLQYGSFCTQLNRALTGIAVEQDKNTQEVFAQVKQIYKTPPIKDFGGFNFSQILPDPSKPSKRSFIEDLLFNKVTLADAGFIKQYGDCLGDIAARDLICAQKFNGLTVLPPLLTDEMIAQYTSALLAGTITSGWTFGAGAALQIPFAMQMAYRFNGIGVTQNVLYENQKLIANQFNSAIGKIQDSLSSTASALGKLQNVVNQNAQALNTLVKQLSSNFGAISSVLNDILSRLDPPEAEVQIDRLITGRLQSLQTYVTQQLIRAAEIRASANLAATKMSECVLGQSKRVDFCGKGYHLMSFPQSAPHGVVFLHVTYVPAQEKNFTTAPAICHDGKAHFPREGVFVSNGTHWFVTQRNFYEPQIITTDNTFVSGNCDVVIGIVNNTVYDPLQPELDSFKEELDKYFKNHTSPDVDLGDISGINASVVNIQKEIDRLNEVAKNLNESLIDLQELGKYEQYIKWPWYIWLGFIAGLIAIVMVTIMLCCMTSCCSCLKGCCSCGSCCKFDEDDSEPVLKGVKLHYT

SEQ ID NO: 167 - protein, 1260 aa, Artificial Sequence
  Recombinant SARS-CoV-2 S Polypeptide
QCVNLTTRTQLPPAYTNSFTRGVYYPDKVFRSSVLHSTQDLFLPFFSNVTWFHAIHVSGTNGTKRFDNPVLPFNDGVYFASIEKSNIIRGWIFGTTLDSKTQSLLIVNNATNVVIKVCEFQFCNDPFLGVSNHKNNKSWMESEFRVYSSANNCTFEYVSQPFLMDLEGKQGNFKNLREFVFKNIDGYFKIYSKHTPINLVRDLPQGFSALEPLVDLPIGINITRFQTLLALHRSYLTPGDSSSGWTAGAAAYYVGYLQPRTFLLKYNENGTITDAVDCALDPLSETKCTLKSFTVEKGIYQTSNFRVQPTESIVRFPNITNLCPFGEVFNATKFASVYAWNRKRISNCVADYSVLYNSASFSTFKCYGVSPTKLNDLCFTNVYADSFVIRGDEVRQIAPGQTGKIADYNYKLPDDFTGCVIAWNSNNLDSKVGGNYNYLYRLFRKSNLKPFERDISTEIYQAGSTPCNGVKGFNCYFPLQSYGFQPTYGVGYQPYRVVVLSFELLHAPATVCGPKKSTNLVKNKCVNFNFNGLTGTGVLTESNKKFLPFQQFGRDIADTTDAVRDPQTLEILDITPCSFGGVSVITPGTNTSNQVAVLYQGVNCTEVPVAIHADQLTPTWRVYSTGSNVFQTRAGCLIGAEHVNNSYECDIPIGAGICASYQTQTNSHQQAQSVASQSIIAYTMSLGAENSVAYSNNSIAIPTNFTISVTTEILPVSMTKTSVDCTMYICGDSTECSNLLLQYGSFCTQLNRALTGIAVEQDKNTQEVFAQVKQIYKTPPIKDFGGFNFSQILPDPSKPSKRSFIEDLLFNKVTLADAGFIKQYGDCLGDIAARDLICAQKFNGLTVLPPLLTDEMIAQYTSALLAGTITSGWTFGAGAALQIPFAMQMAYRFNGIGVTQNVLYENQKLIANQFNSAIGKIQDSLSSTASALGKLQNVVNQNAQALNTLVKQLSSNFGAISSVLNDILSRLDPPEAEVQIDRLITGRLQSLQTYVTQQLIRAAEIRASANLAATKMSECVLGQSKRVDFCGKGYHLMSFPQSAPHGVVFLHVTYVPAQEKNFTTAPAICHDGKAHFPREGVFVSNGTHWFVTQRNFYEPQIITTDNTFVSGNCDVVIGIVNNTVYDPLQPELDSFKEELDKYFKNHTSPDVDLGDISGINASVVNIQKEIDRLNEVAKNLNESLIDLQELGKYEQYIKWPWYIWLGFIAGLIAIVMVTIMLCCMTSCCSCLKGCCSCGSCCKFDEDDSEPVLKGVKLHYT

SEQ ID NO: 168 - protein, 1261 aa, Artificial Sequence
  Recombinant SARS-CoV-2 S Polypeptide
QCVNLTTRTQLPPAYTNSFTRGVYYPDKVFRSSVLHSTQDLFLPFFSNVTWFHAIHVSGTNGTKRFDNPVLPFNDGVYFASIEKSNIIRGWIFGTTLDSKTQSLLIVNNATNVVIKVCEFQFCNDPFLGVTSNHKNNKSWMESEFRVYSSANNCTFEYVSQPFLMDLEGKQGNFKNLREFVFKNIDGYFKIYSKHTPINLVRDLPQGFSALEPLVDLPIGINITRFQTLLALHRSYLTPGDSSSGWTAGAAAYYVGYLQPRTFLLKYNENGTITDAVDCALDPLSETKCTLKSFTVEKGIYQTSNFRVQPTESIVRFPNITNLCPFGEVFNATKFASVYAWNRKRISNCVADYSVLYNSASFSTFKCYGVSPTKLNDLCFTNVYADSFVIRGDEVRQIAPGQTGKIADYNYKLPDDFTGCVIAWNSNNLDSKVGGNYNYLYRLFRKSNLKPFERDISTEIYQAGSTPCNGVKGFNCYFPLQSYGFQPTYGVGYQPYRVVVLSFELLHAPATVCGPKKSTNLVKNKCVNFNFNGLTGTGVLTESNKKFLPFQQFGRDIADTTDAVRDPQTLEILDITPCSFGGVSVITPGTNTSNQVAVLYQGVNCTEVPVAIHADQLTPTWRVYSTGSNVFQTRAGCLIGAEHVNNSYECDIPIGAGICASYQTQTNSHQQAQSVASQSIIAYTMSLGAENSVAYSNNSIAIPTNFTISVTTEILPVSMTKTSVDCTMYICGDSTECSNLLLQYGSFCTQLNRALTGIAVEQDKNTQEVFAQVKQIYKTPPIKDFGGFNFSQILPDPSKPSKRSFIEDLLFNKVTLADAGFIKQYGDCLGDIAARDLICAQKFNGLTVLPPLLTDEMIAQYTSALLAGTITSGWTFGAGAALQIPFAMQMAYRFNGIGVTQNVLYENQKLIANQFNSAIGKIQDSLSSTASALGKLQNVVNQNAQALNTLVKQLSSNFGAISSVLNDILSRLDPPEAEVQIDRLITGRLQSLQTYVTQQLIRAAEIRASANLAATKMSECVLGQSKRVDFCGKGYHLMSFPQSAPHGVVFLHVTYVPAQEKNFTTAPAICHDGKAHFPREGVFVSNGTHWFVTQRNFYEPQIITTDNTFVSGNCDVVIGIVNNTVYDPLQPELDSFKEELDKYFKNHTSPDVDLGDISGINASVVNIQKEIDRLNEVAKNLNESLIDLQELGKYEQYIKWPWYIWLGFIAGLIAIVMVTIMLCCMTSCCSCLKGCCSCGSCCKFDEDDSEPVLKGVKLHYT

1-66. (canceled)

67. A non-naturally occurring sudden acute respiratory syndrome coronavirus (SARS-CoV-2) spike (S) glycoprotein, wherein the SARS-CoV-2 S glycoprotein comprises:
(i) an inactivated furin cleavage site, wherein the inactivated furin cleavage site has the sequence of QQAQ (SEQ ID NO: 7);
(ii) mutation of amino acids 973 and 974 to proline;
(iii) mutation of amino acid 67 to alanine;
(iv) mutation of amino acid 202 to glycine;
(v) mutation of amino acid 229 to histidine;
(vi) mutation of amino acid 404 to asparagine;
(vii) mutation of amino acid 471 to lysine;
(viii) mutation of amino acid 488 to tyrosine;
(ix) mutation of amino acid 601 to glycine; and
(x) mutation of amino acid 688 to valine;
wherein the amino acids are numbered according to SEQ ID NO: 2.

68. The non-naturally occurring SARS-CoV-2 S glycoprotein of claim 67, wherein the glycoprotein comprises a polypeptide sequence having at least 95% identity to SEQ ID NO: 115.

69. The non-naturally occurring SARS-CoV-2 S glycoprotein of claim 67, wherein the glycoprotein comprises the polypeptide sequence of SEQ ID NO: 115.

70. An immunogenic composition comprising:
(i) the SARS-CoV-2 S glycoprotein of claim 67;
(ii) an adjuvant; and
(iii) a pharmaceutically acceptable buffer.

71. The immunogenic composition of claim 70; wherein the adjuvant is selected from alum, incomplete Freund's adjuvant; aluminum hydroxide adjuvant; a paucilamellar lipid vesicle; monophosphoryl lipid A; MF-59; or a saponin adjuvant.

72. The immunogenic composition of claim 71, wherein the adjuvant is a saponin adjuvant.

73. The immunogenic composition of claim 72, wherein the saponin adjuvant comprises at least two iscom particles, wherein:
the first iscom particle comprises fraction A of Quillaja Saponaria Molina and not fraction C of Quillaja Saponaria Molina; and
the second iscom particle comprises fraction C of Quillaja Saponaria and not fraction A of Quillaja Saponaria Molina.

74. The immunogenic composition of claim 73, wherein fraction A of Quillaja Saponaria Molina accounts for 50-96% by weight and fraction C of Quillaja Saponaria Molina accounts for the remainder, respectively, of the sum of the weights of fraction A of Quillaja Saponaria Molina and fraction C of Quillaja Saponaria Molina in the adjuvant.

75. The immunogenic composition of claim 73, wherein fraction A of Quillaja Saponaria Molina and fraction C of Quillaja Saponaria Molina account for about 85% by weight and about 15% by weight, respectively, of the sum of the weights of fraction A of Quillaja Saponaria Molina and fraction C of Quillaja Saponaria Molina in the adjuvant.

76. The immunogenic composition of claim 73, wherein fraction A of Quillaja Saponaria Molina and fraction C of Quillaja Saponaria Molina account for about 92% by weight and about 8% by weight, respectively, of the sum of the weights of fraction A of Quillaja Saponaria Molina and fraction C of Quillaja Saponaria Molina in the adjuvant.

77. The immunogenic composition of claim 70, wherein the SARS-CoV-2 S glycoprotein comprises a polypeptide sequence with at least 95% identity to SEQ ID NO: 115.

78. The immunogenic composition of claim 70, wherein the SARS-CoV-2 S glycoprotein comprises the polypeptide sequence of SEQ ID NO: 115.

79. The immunogenic composition of claim 70, comprising a second SARS-CoV-2 S glycoprotein, wherein the SARS-CoV-2 S glycoprotein comprises:
(i) an inactivated furin cleavage site, wherein the inactivated furin cleavage site has the sequence of QQAQ (SEQ ID NO: 7); and
(ii) mutation of amino acids 973 and 974 to proline;
wherein the amino acids are numbered according to SEQ ID NO: 2.

80. The immunogenic composition of claim 79, wherein the second SARS-CoV-2 S glycoprotein comprises a polypeptide sequence with at least 95% identity to SEQ ID NO: 87.

81. The immunogenic composition of claim 79, wherein the second SARS-CoV-2 S glycoprotein comprises the polypeptide sequence of SEQ ID NO: 87.

82. The immunogenic composition of claim 79; wherein the adjuvant is selected from alum, incomplete Freund's adjuvant; aluminum hydroxide adjuvant; a paucilamellar lipid vesicle; monophosphoryl lipid A; MF-59; or a saponin adjuvant.

83. The immunogenic composition of claim 82, wherein the adjuvant is a saponin adjuvant.

84. The immunogenic composition of claim 83, wherein the saponin adjuvant comprises at least two iscom particles, wherein:
the first iscom particle comprises fraction A of Quillaja Saponaria Molina and not fraction C of Quillaja Saponaria Molina; and
the second iscom particle comprises fraction C of Quillaja Saponaria Molina and not fraction A of Quillaja Saponaria Molina.

85. The immunogenic composition of claim 84, wherein fraction A of Quillaja Saponaria Molina accounts for 50-96% by weight and fraction C of Quillaja Saponaria Molina accounts for the remainder, respectively, of the sum of the weights of fraction A of Quillaja Saponaria Molina and fraction C of Quillaja Saponaria Molina in the adjuvant.

86. The immunogenic composition of claim 84, wherein fraction A of Quillaja Saponaria Molina and fraction C of Quillaja Saponaria Molina account for about 85% by weight and about 15% by weight, respectively, of the sum of the weights of fraction A of Quillaja Saponaria Molina and fraction C of Quillaja Saponaria Molina in the adjuvant.

87. The immunogenic composition of claim 84, wherein fraction A of Quillaja Saponaria Molina and fraction C of Quillaja Saponaria Molina account for about 92% by weight and about 8% by weight, respectively, of the sum of the weights of fraction A of Quillaja Saponaria Molina and fraction C of Quillaja Saponaria Molina in the adjuvant.

88. A method of stimulating an immune response against SARS-CoV-2 or a heterogeneous SARS-CoV-2 strain in a subject comprising administering the immunogenic composition of claim 67.

89. The method of claim 88, wherein from about 3 μg to about 25 μg of CoV S glycoprotein is administered.

90. The method of claim 88, wherein about 50 μg of the adjuvant is administered.

91. The method of claim 88, wherein the adjuvant of the immunogenic composition is a saponin adjuvant.

92. The method of claim 88, wherein the subject is administered a first dose of the immunogenic composition at day 0 and a boost dose at day 21.

93. A method of stimulating an immune response against SARS-CoV-2 or a heterogeneous SARS-CoV-2 strain in a subject comprising administering the immunogenic composition of claim 79.

94. The method of claim 93, wherein from about 3 μg to about 25 μg of CoV S glycoprotein is administered.

95. The method of claim 93, wherein about 50 μg of the adjuvant is administered.

96. The method of claim 93, wherein the adjuvant of the immunogenic composition is a saponin adjuvant.

97. The method of claim 93, wherein the subject is administered a first dose of the immunogenic composition at day 0 and a boost dose at day 21.
